United States Patent Application Publication US 2026/0058010 A1 - sequence listing, part 19

SEQ ID NO: 217 - DNA, 127988 bp, Homo sapiens
  source 1..127988: mol_type = genomic DNA
aactacaggcactgcacgttgcaagataagggacgttgcacatccttcacctgggaaacttctggactcctaacttcacctgggaaacttctggactcctgtgagtctggctgggggtggggggggtccctggcaagccactcacttttggggcctcactcactgcccgtgttttgcctccatgatcttagaattttggcaagatctggactagacagagggctgaggcttgggctggggttgggagaattctctgctgagaacagagaaactgggacccctcagggcttcttacaggaacaggaagcaacgactggggagtcccagaggaaggcgttgagcagaggggccgtgtggtgggtgggcaccccagcaggcagggtgctgggggaggaacatgagcccctgcgggctttggaaagagcagtgaagtacagccccattgcctctgcccagggctagcggaaagtgaagtgttcccagccccattgcctctgcccagggctagcggaaagtgaagtgttcccagccccattgcctctgcccagggctagcggacagtgacgtgtccccgcaggctgaactccgactggtgacaacgggtcagcgtcctcactccctggagactcggagcctggacttgccaaatttggcacctgcccattttttttttttttctttgagatggagtatcactctgttgcccaggctggagtgctgtggctcgatctcggctcactgcaacctccacctcccaggttcaagctatattctgcctcagcctgctgagtagctgggattacaggtgcctgccaccatgcccagctaatttttgtatttttagtagagatgggatttcaccttagccaggatggtctcaatctcctgacctcagatgatccacccacctcagcctcccaaagtgctgggattataggcgtgaaccaccgtgcctggccttttaaaaaaaaaattttagattcatgggtacatgtgtgggtttgttatgtgggtatatagcttgatgctgaggttttggcttctaacgatcccatcacccagggagtgaacgcagctcccaacaggtggttttccagccctcgtcctcgtcctcctccccctcccacctgcccctctggagtccctggcgtctgctattccctctctgcgtcatgtgcatgcagcattcagctcccatggataagtgagaacacgtggttttggttttctgttcgggttgagttctcaggctgacggcctccagctgcatgtgtggctgcaggggacgtgctctcctccattttcccggctgcatcgagttcatggtctgtctgcacacgtgaggccacctgccaggccacatcccagcacaggcgtcatccagtgatttcctcatcggccagagtctgcgtctgcagctttgtgagccacgcggccatggcctgactctgtgccgagagccccgcagcggtggccacagacaatagtaagcaactgggtgtggctgggcgccaataaaactgtatttattaaaacaggcaaggggctgggctgcggcagggcccaggtgcctgggaaagaggtgggaccgggccccaacccccagctcggctcccaggaagacacacacagtgctgctgcctaatcctctctttatttggtctctgctgaagcagtcgtgccagcctcctagacacggcctcaggtttgtcgctgtccatgtcctccagcacccctcttaccagaccacaaggagctgcattatgatgtgtgacttaggtcttggttggagggctgagcggccgcaagtgctgggggaggctgcttggagcatgggaggcctgcgggtggaagacaccagggtgcagcctggtgcatggtccggggcttggcctccctatggggcgtggggggctgtggtacatgcagaggcggcggctgtcccagcagcctggccaggagataccgtggagaaggcacgtgtttgagttggcatcactgtccccagacgccctccctcgggtagagccgcctgtcctaggagaagctgtactccagatgcagtgggtgacaccctggtcactcagccacaccccggcccctcagcctctgctgtcctggccgcacatagagccctgtcctgctgtgtctgccgggcacaccccggtcactcagccacactggctcggcccagcgccttcccgaggtctgtgggggtccgggcggaggtggggtcagtgccgtgcgtgtttgatccagtttctgatcatccacttctgccccgagcacctctgtaccaccagccggagcccaaagttggcatctttggacatctccacctccaggcagcggcccgtggcccggctcacaatggggccactctgtggggacaggcacatcaagtcagccaggtgcaggcgtccttgttccccctccccccacctcagggaggctgcttcgtgctctcagccctcgtgctcattcttggggcagcttgaatggaaagccagcatcacagcagcacccaggggggccgggaaggggctgacttcagtggagcttcgaggatttcccatctttcctgcagggctagcggcccaggttggaatcatacctcatccccttcctaaatcctccctctaccctgggcacctgaggctggaagaggcagatgcagggctatgatcagactgtccagcccgacccctctctggctgtgtgaccctgaccagtcacctgccctctctgtgagcgtcggggcccataagggaacagctgatccaaggcccggtcccctgaccaccccctgccgcactccagctcccacccaatgggctggctctagtggcagaggcacccaggggtcccagcagccctgccccgccccaaccccacggccccccttccccagaggctgacctgggtgaagtcccacagccgctgtgttggccgcgccacatcctcacacttcttcagggtgggcatgcggcccgtgccgtcatccaccagacacttggagtcaggcaagaaggctgtggagcccagaggccccagctgcagcagtccatcagcgctgtaccgcaccagctggggacaggaccaccgggactgtgtgtgagcagcgcccaggctctccccagtgagcactgacaggccgtgcgagctgccttgagctgcaaacggggccctgcgcggctgccttggagcctcccaccccggggacgctgttgcgggcgggagaggaccgccgggcagggcccacgtggggatgcgggctggacggcgcccaaatgctccgcagggccaggctcccggcttgcacagctggctggtcttccgcctggacagacgtcatgaatgtggctcagacccagagcgcggccccactcgtttcggggaggacaggagttgggtttaatttgggcaacatgcagtgccgtgtgtgagcggaacacgcattcccgtggggttagaaacgtccagctccttatgggggtcatggtcagaatggcctggaccttcactacggccagcccctgaccactgtgattctgcggggctggggctggggctgggcctgggcctgtgctgcaggtgagtcctgcccaggtggggagtgctcggaggtcaacagcactattgccgtgttaatccaccccccgagccaatgcttcccacacttcgcttcaatcacgcgacagtcctgagcggtaagtgctgttgccgtctctcttgactgaggggggagtgatgcacccccagcccatctgaccccaaaggcctggttcctttttaattttttgagatacggtctcgctctgttgcccaggatggagtgcactggtgtgatctcagctcaacctccgcatcccaggctcaggtgatcctcctgcctcagcctcccgagcagctgggaatacgggcatgccccaccatgcccggctaatttttgtattttttgtagcgacagggtttcgccacgctgcccagactggtctcaattcctgggcttaagtgatctgtctgccttggcctcccatcgtgctgagatgacaggcgtgagccactgcacccggcccaggctgttttcaattccccgtgttctgctaccttccaggtggggcgggctgggaggcctcttctagaggggccctcaggctgctccaagccctggaatgcagccctggtggcctcagaacaccccagcaggctggacccgtgcctctgccccagggtgtagggtccgggtggcctggggtcgtccccttgggagctgcatgggtggccgctgctactcctacctgggaggacatcccgtggcaggggtagaggatcgcccggtcgccgtcctccgctccctggtccagacagtaggcactggctttgctgtttctcacctgcaagcagaagccccaggagaaagtccagagtcacccgagggtgcggccccagggagcttcacgcagccagctctgcagccagcacctaaggaggtgcccgcgggaggaggagggggcgtgtgggatgctctggccgggtgggctgcctgggaaggggtggctgaccgagtttgtcactgatggagacatggaagtgtccgccatgcacagatggagacttggccatcactccataggggaacacttgagcagcagggacgacggccccaggctgtggagtggcttccctgccttgccgcctgctccctgtgcccttgcggctcccactgagtgggtagagaccgctcgccagccttgcagtctaggctggccttggcttggacccttgggagaccttccagcttccactctgtcttggaaggaaccctgacagccctctgagaacaagcccgggccagactgctgggggatgtgttgtcatcgggcagccaacctccagcctccagaacaggcccatcggagatcagcacagcctggatcaggccagcagcactgcctgggtggccccggctcgtgagcaagtgtagatgcttattgcttttgtccaccgcgtctccaggctgctgggtttgcagcagcagctgacccatccaccacggccaccacgagaggtcacacaggtttgaattgggaccgttgaggaagcccagcagagtctggatgttacggctgctctgggttgggggtgcctgcacttggctaattgaggatggagtgggcagagtagaagcacagggaggctgggggagaggggcggtgccccgatgcacactcagcactgcctgggaaacctctgtgcccaagggactggagtcagcgcagggtggaccaggagctgcaggaggggaggctcagcgaggaccatccaccccagggacccttttccttgccccatccgagtgccagctcagggctgggacgctcgagtctcatggtgggaggcaccccatcccctgcacagactggggagagggcagaagagcagcaccttctcgctggctttacggagtgctgtgcatgtgggggccagtggagacgggggtctctgtgtagctgatgggcctgtgtgagtgtgcatatcacccattgtgtgcatctgtgggggcaccttcatgcatgcacgctggtgtatgaacgtggctccgcatatgtggatgcacagacgtgtacacacacacattattttgcttgataacaagggcctgtgtgtttatctgtgcacaggcaggcgcctttggggttcatgcacttagtgaaacatacatctgtgtaggaagagctgtgtacattagcaaaactgggtgcaaatgtatactcgtgtccgcgtgctcttgtacatatgagtgtttgcatggatttacgtacctgcctgtgaatgtctctgtacacacatctaggtgagtgcatgtatccctatgtacacatacgtgagagcgtaggtacattgaatcaggcatgtgaacacgcatggatgtgactacacacctgcctgcctctagggaggtccatgtgaaggaatgggtgtgtatggacatgtgggtctgcaggtgcgtgtgtttatgtgaacctgcaccttgtgtgtgcacgtggatgtgcctgcatcaccgtgaatgcacacgtgtgtgcaggagtcagggcggaaggcctgtcgggccgagtgggaccctctgggggaggcgctacctctccgtgtgcatgtggatgtgcctgcatcaccctgaatgcatacgtgtgcaggagtcagggcagaaagcctgtcgggccgaacggggccctcgggggaggtgctacctctccgtacgtgagggtgttgttgtagaccctcatctccgggtacacgttctccaggtaccacttgaagctgcgacacttcagcctctgacgcagggccagcctctcagacacgtccccgaagtccacccctgggttctgcaaggccagaagtaggtgagagggtacatgggtgtcaccatgacctgggtcttccccataatgaggttgggggtctccagggaccaagtgccctcacaggagcagcctcccccccagtattcagatgctgaggccccatccagttgggaccccccagcctcctaatatccacagagggtctgaggcagctgctcctgatgggaaggaccctgccagaggccagccccggcctggacagacggcccctgctgcagccggctcgtccacacccacccgggcccaggaacctcctgcctgagaagacggccctgctcacctggccttactgcacggcatcagcctgacctctggagggtggagactgaggtcagccatatccagagaccagcctggtgaggaccctggatactgaggcttgggggctcctggctggccccgcctggcacgtgttgtcacgcatgggtgccggagaatcaagtccttgggaccccccgcggggggacacctgagagcttgtacctggcctttcctggtccctgcccaggcgtctcttccctctgctgactttgacccgtgtcctctgccgtgagaacccacagccgagtgcggtgtctgtgtcttcctgggactgtggggcctgagaggctgtagggaccagcactctctgacggacagccagccctgagggagcacctgcaccctgcccagggaccctccaggctcaggccttgtggggagggcagacgacttggccttcacggcctgggcttgaatcccgtcaccttctggtatgtgggcctgggacagtcccctatcttctctgtgcctcagttactcattggtaaagtggggacgatcacgccagaaactcattgttgctctgttatgaggttttaatcagccaaggggctcacaccagggcccttggacacggaggtgacaggcatttgccggcctcactgcccgggggcctggagcacctcactcagttgcccacacacttggggaggtcatcaccctgcacgttttccttatcacttcatggaaaacaaggctgtaggagcaccgggtaccctcttctcgtctctcagacacgagtgcacgtgtctacggctcctgatctgcctggcgggagctgatatgggggctggatgctggatttgcagtgaatggtccagcccggggccacttcaggccgtgtcacccacacgctggggtgcactctagcagggggtggtaagccaatttaggggctgtggtgggaagttttaagaagtagtaatattgtaaatgagaagggtcactttggtgctacgtacacaaagcgctgtatgtggacagatgtaaatgtatgcgtgtgtgcgctgggtcatgacttaagatctggctcattagggttgatgcagacaagcccgtttctaagatgagccctcccagaactcagggacccagtgcctgcagtggccagggaaggaagggggtggttccagagacgctggggtgtggcgggatgggtcgcggccacccgtctcagtacctgcctttcttagggttgtgggggtggggcgctttgagaaaagccagaattcaggctctttatgggaaattacaaattagaaaacaaacagcaatcctcaacttgaagcgggtcagccactcataggccaaagcccaacaggaaacaaccaaaaacgtccatccacggacgagtggatccacacgaggggccctttcacactgtggacgtgactcagccatggtgggggtgacctggaaaaggtggcgctgaggacgggaagccacacagcgtatgagccgttcatgaaaccgccagacagttgaggctgcccggggctggggaggggtccgcactggctgacaggtgctgtgcagggcactaagtggggccctggctgaggcggcggcaccaggttggggagaggccgcccctccctggcttctaaccacggggcaattgctctaggctgagaggaaaaacgcccaccacaccggggtgggtgtgagctggtctcttcccagtgtgaggaaggctccttcccaggcagacagctcacccactcacacctgcacacacaactgcttgcacctgtgcacacctgtcaacacacccactcacacctgcagggggccctagggggcctccctccggcccagccctgccgtggcattgaccccgaccctggggcatggccccggctcccggcctgtgggggactcaccgacatggggatgttccaggccatgtacacgtgggacttgaagtcatccatccacacctcggcggcgcgcagggcgttgcgcttggcatagtagtcaatgtcgttgttgtagggcttcctggtgcgctcgatgtgggccacgcgggagcagggcagcacctccatgctgccgccacactgccacacctgcggggagacggcgctgggtgccggcgtccttcccaacggaagcgggcagcccggccagctaggggcccgtgagaggccaaggggcccggccctctgttcctggggcacccccaccaccgacgggcctggtgggtcccggggctttgcctctcgggggctgttttcaggggaccccgcccacagagaaagttcaggtctgggttgcgtcctctctgggacttctttctcttgtgcgttacacgatggctgtggggaggggggtttattctaccgaccccaacacttaacaggtttttcaccctgtggttcccacccccagtgcttgttctgtgcagggaaccccccgccccactgcaccagccacctcccccagcacccgaacacaccaacaatctgtttacaaacagctgcttgccatgcagacaccgctccacgcatccccagaacacacacaatcaaaagcccaaccagcctccccagctaataaaaccccgcagcccctggctttctgaacccccacgcgcagcagaaacgtgtttgtcactgcgtatccttttatgcttccttccgtgtcgttccacttaagcaataccagccttcctatacgtgctctttcactccggtttgtccccccgcgctgtcctgcctgtgagggttggttttgtgtcagcgtggcagggaacagggtgctgggacgtttgctctcccgattctgggtggtctgtgcatggcctctggtgggagccgtgtttaaatctgtcccctacaggcctgagtaggacagaaaggccgaggcagggagtgttcacacactctgctcgattcgggctgggacgtgggtcctcccctgccttcaggcttggagctcacgccaccggctctcctgggcgcctgccagccgacggccaatctcggtaccctcagcccccgtaaccgggtgagtcaattccttagatgaactttcacagctaagcccacgtccccaccatctgctattaatctgtttccctggagagccctgagccagccccgtcccatcctatcctaccctatcctgtgctgtcccatcccatccaccccattaaaaaaaggccgatgccacccacgggctgacatcactatgaacaaatgggtctgatccacgtggcccaagctccgccgtgctcaggtcctcagccctgagcctgccatgctggacgagtgtgccaggcccagggcgggcactgtgcttgcctcatctcctgaatccccccaccacccgagaaagggtgggcagccctggcattgccccgttccctccgcggtgctgagaaggtgccgaggccgagggtggtgccaactgcaggggcgcacggggtggagcctctgcccagctgagctcggatccctcagtcatccctggactctggttcatcctcgtccaggctgctctcatctccaggccgttatcttaatcatgtctgcaaagatcccttttcccaaagagggccacactcacacgtcccctagctgcatcctccgggggtcgcctgtcagcccagcccaccccagaggcccagtcccttgtgtgggggagcagggggctcctccctcccccggactctctgccttcaggaagccgagtcccagggagagagagaaccgggaggccgtatcgccgatcacttacggctgctccgacaccgcccaccgcaggacagatccagagtccggggcaggagggagccgctccctcctcgccgagatgaccacacagcacgcagctaacgccaggctccctgaccccggtccggcaacccagagcctcctcgctgctcagctcagcccagccggggacacccccgccccacagtcccacgtcacccacaggggtccggctccttccccgggatggtggagtccgcggcgccgccgtgccaggctgaagttggcctttgcatcccgagggagcgaaccgcgtttctgcatcaggttcacatcgtggcaggtggtttctgggtttctgtctgttgtctctgctgtgggacaacctgcctgagaaaagcctggggttttccagccccctgagccggggcttcctttctgccttccagactagggtcgggatttctgttcgcagcgggaaggggccccgctggtgaatcccgcccaccgccctcccactccgcggatgtctcccaccctcaacctgagaccacccaggtttcgtgagaaggaggggggaagcacctcggagccctgcccttcgctggaaggggccggaacgaaggaagctctgcaggggcgggacagagcctcgtcctccatcgtctgcccacccgtcttcagaagcgcctggcacactggcctctgggacgacctccagcagtttcagcctccttgtctacccccagtacagaggccacggtgactcggtccccccacccaccacagaatcctgtcctcgggcctcacgctggggaacacgaagccccccagggctcctgacgcctgccttgcccaccccctgggttcgaagcaccttggccttcccagcacccccacgtgcacccctcagggccttggcacaggtggtgcccacgccgggcgcccttcccaggtctctgcatgctccactgcctccagccttcaaagctctagtgccagagagattagttaaaggcacaaaaccagccgggcacaggggcctcacacttgtaattccagcactttgggaggccgaggtgggtggatcacttgaggccaggagttcgagaccgcctggccaacatgatgaaaccccatgtctactaaaaatacaaaaattagctgggcatggtggcagatgcctgtagtcccagctactcaggaggctgaaacatgagaatctcttgaacccgggaggcagaggtgacagtgagctgagatcacaccactgcactgcagcctgggcgacagagcgagactccgtctcaaaaaaaaaaaaaaaggaccaaaaccacaggcagagaggagccagtgctggtgccgctgagggaggaccgtggacctgaccgtgacccagccggcaactgggaggaggagccgagcccccacacaaggaaatggcaaatgtggagatggcggctgacctgagtgcggcacgccataccccgtgaacggggacaatcctatttgtccattaaaaaaaccagcgagcctgggcaacatagtgagacaccacctccacagaaaaaaacaaaattagccaggtgtggtggtgcatgcctgcggtcccagctgcttgggaggctgaggcgggaggatcacctgagcccgggaggttgaggctgcagtgagccaagatcacgtaacgctctccaacctgggttaaagagtgagaccctgtctgaaaacataaaaagtaaaaataaaccccaaatgtcaccatcaagtcttcagggtgagtcctctccctccatcctgtttagagccgccgtccttgccccatagctgggcgtccggaccagaggctcacacccctcagtatggcgccgcctgctatccgtccccgtctctgcctgtccctccccatggctcagctccgcaggacagggtttctgtcgcttctgctcacagctgcctcccagtgctcagagcgaggccgggcacacagtaggtgcttgataaatagctgcggaacgaatgtgttccctttaggaaccccacagccacttacggccactctgtccccggggccttctgtggcgctggggcgattccacatgggaacctggtgggactgctgggcggtctgcgaggcctccccaagccagctccacaggtgccagccccgtcagtgtgtgctgagcttgcgggtggtgccgaggccccttcttgggtgaatgcagcctcaggtctctcggccctcgggtcccccaccgtgtctctagaaggaccgaagctacgggagaggcgaggctcccgggcggtgggagtcggccaacttccatcattagctgaggacctgtcacagccggggactgggctgcttcagtctccgggcttgggccgcagacccctgagctttcggggtgtgtgaggtgccccctaagcacaagggcccacggcttgcgtgacctggcttttcagcagggccattagctcaggagtgataaagtcggagagtgaacccccatgccctcagcaacatcccctttccaatccctgcaaaacagggaaagaacaagacagcccccaccccccaccacgactcctcgcgcaagcagcactggtgtgtggcgtccccacacccggggcaggtctcttttctgcgtcagagttaatgaccgtgtagtttttcacatattttgaagccagggaccagtatatcatctgccttgtgccgcgctccccgggagattgatgcttatgcagagggagaatttaaaggctctcccatcacagtctcaagggaaacagtttaacccctctataaatttcagatgaatattggcaataacttctccactctgtgggccagaggagaccaacacctaaggatcaggcaaaatcctcccacaggagccagaggcacttggcccccctctcaggggctctcaagaggcaggaggcccgggcccctccccttcctggccacactagaggaagatcaggtgaaggaggccggagcccggctggcactctgcactgagagcaactggggataagctggactcgccttctggcgtctgtgtgtgcagctctccccactgagagggggacgctatcaccctaggccttcgtcacgtgatttgcttggaccaacagaaagggccagaacccacccagtgccaaggccaagcttgggcctcaggagactgcactcacaccgatctctgtcttgtaacctggccgccagcatgaggatgagagaccatgtggagcagagagaagccgcccagctgagcccattcctccccaccccaaccagccaaccccgctcacctggctgctgactgccggcatcagcaaggccagctgagagcagagccgctctgctccacatagaccatgtgccaacccagagttgtgggccaaggaaatggttgtcttaggccgcaacatttcagagtggattgttacacatccaagagctgacccatccatgctgctttggcaggtacagctggcaaagaccctcactcctgtggcttccttgcatgcagcacatagtaccagttaatgctagttactagccatgcatccccactgcccaagacaatccgagttgatacccctgtcttggggtaattattaatagcacctctggtaactctcaggtgtcctggtttgggtgacgatgcctgtggtcacccccgtgctacctgaccatctggccccacagccagggcggaagtccaagcattagagccattcaaaccacatcgtgaacaggggctgggtaagatgaggctgagacccactgggctgcattcccagatggtgaaggcactctaagtcacaggatgagataggaggtcggcacaagacacaggtcacaaagaccttgctgataaaataggttgcagtaggccgggtgcggtggctcacgcctgtaatcccagcagtttgggaggctgaggtgggtggatcatgaagtcaagagatcgtgaccatcctggccaacatggtgaaatgccgtctttactaaaaaaaataaataaataaataaataaaaaataaaaaattagctgggcatggtggcgtgcacctgtagtcccagctacttgggaggctgaggcaggagaattgcttgaacttgggaagcaaaggttgcagtgagccgagatcgcaccattgcactccagcctgagtgacagagcaagacttcatctcaaacaaacaaacaggttccagtaaaggagccgccaagtcccaccaaaaccaagatggcaacgagtgacttgtggtcatcctcacggctcattttatgctcattataatgcattagctgctaaaagacactccccccagcaccaagacagttcacagatgccatgggaacgtcaggaagttaccctgcgtggtctaaaaagggtggagccctcagttcggggaaatcctgctgcctttcccagaaaactcaggaataatccatcccttgtttagcaaatgatcaaaaaataaccacaaaagttaattagtaaataatcaaccagcagccctgggggccactctgcctgtggagcagccattcttctctttacttcatttctttacttctctaataaacttgctttcactttactctgtggactcgccccgaattctgccttgtacaagatccaagaggcctctcttggggtctggatggggacccctttctggtcacacgaggaagacacgggtggcgtgggtgacacaccaaggctgaggggccgtcactaactgcagaggccagagatgggaaaacaggagactcctccagagatgggtgggtccctggggcccgtcgtctgcaggccccgggctggcacatcacagcgagaggagagacaggagaggggccctgctgcgcgtgggcgttgggtcaaaaactccccctgtacattcaggactgacgttgtctttggcggcgctgtgggcctggcaaagggcctgcgggcgaggccgtcccgtgaagtcggacctgttcttctggtcaaggcaagcaaagcaacagggctcgtagggttctcctggaagcgctggggacatgcggccttcatcgtgaaactgtcatctagaggggaggcaggcgaggctcagacgtcacactcatcacgtgtgggtgcagctggaggactgagtggggccatgaggcttgggcaggaggtgcgccctggctggggacggcttcctgaaccccagctctgagcggagatgggtggcgagtggggttaactggcggtgagacacaggcatgcttgaggcccgagccccgtcctcctgggctgtggggctgtgcagagctggcatgggcaggctgtgctgcggtcagggaagctgaccatcttaatggttgaattgagaagaagctccaacttgccaaaagccaaacttgcaccaaaaaagggcttggtcgccatctggaggtcgccgtctggcggttgccatctgggtggtcgccgtctggaggtcgccgtctggaggtcgccgtctggcggttgccatctggaggtcgccgtctgggtggtcgctgtctggaggtcgctgtctggtggtcggctgccggcctgactcacaacagctttctgaatcctggcaaaaccatcacacttgagaggtgcgctcagcaaatccatgagatgcaccaaaaatcgcggtgcctgccgccggcctcagtccacagaaagggcccagttcttctccaccacaacgcctggctgcacgtcacacaaccaacgcttcacaagctgaacgaattgggctgcaaagttttgcctcatccgccacattcacctgacttctcgccaaccaactaccgcttctgcaagcctctcgacaactttttgcagagaaaacgcttccacaaccagcaggatgcagaaaatgctttccaagagtttgtcaaatcctgaagcacagatatatttatgctacaggaataaacgaacttatttctcattggcaaaaatgtgttgattgtaatgcttcctattttgacgaataaaggtgtgtttgagcctagttataatgatttaaagttcatgatccgaaactgtaattacttttgcaccgacctagtacgagaaaacacctcagacgctgtcaccacagcagtgaggaggcaacctcgtgtctattcggtcaaaccacatgcagctgcctttcgcgctggccagaaacagccgtgtatccgcagtcttactgtgatccgctcactccgtccaccctctctcgtccacctggccattctgtgtccctcatcctctgtctccaccgtggttttcccgaatattctctctgtgaaaggcagcaggcccagagcttcccagagcatttccccctctccgtcgaggggaccctggggcaggtccttcaagagcatttgtgggaattaggagatgggcacggaaggctgaggagtatgtccaagtcacccagccagcacctgaggcagccagactccaaacttggtccccaacagcaggccacgtgctcacacactgcacccctgccctgcaatccacgcctgtgggctgtggcccatgtgacggttttacatctgctcaggaggtgaaggtcccattattcagtggatgtgaggtgctgctgggaccatgtctgcagctgtgagtgatgcttgcgtcagtggacactccgcatggcagcggacgtgcacgcaggcaggccccacccagccaggcattgagagaaaagacgggtggggagttcccagagaaggatgccagccttcagaccgtgacacggaaaccccacccgggtctacagccttcacaccacgacacggaaaccccacccgggtctgcagccttcagacctcgacacggaaaccccacccgggtctgcagccctcagacctcgacacggaaaccccacccgggtctgcagccctcagacctcgacacggaaaccccacccgggtctgcagccctcagacctcgacacggaaaccccacccgggtctgcagccctcagacctcgacacggaaaccccacccgggtctgcagccctcagacctcgacacggaaaccccacccgggtctgcagccctcagacctcgacacggaaaccccacccgggtctgcagccctcagacctcgacacggaaaccccacccgggtctgcagccctcagacctcgacacggaaaccccacccgggtctgcagccctcagacctcgacacggaaaccccacccgggtctgcagccctcagacctcgacacggaaaccccacccgggtctagcagccctcagacctcgacacagaaaccccacccgggtctgcagccctcagacctcgacacggaaaccccacccgggtctgcagccctcagacctcgacacggaaaccccacccgggtctgcagccctcagaccgtgacatggaaaccccacccgggtctgcagccctcagaccgtgacacggaaaccccacccgggtctgcagccctcagaccgtgacacggaaaccccacccgggtctgcagccctcagacctcgacacggaaaccccacccgggtctgcagctctcagaccgtgacatggaaaccccacccgggtctgcagccctcagaccgtgacatggaaaccccacccgggtctacagccttgagaccgtgacacggaaaccccacccgagtctacagccttgagacctcgacacggaaaccccacccgggtctgcagccctcagacctcgacacggaaaccccacccgggtctgcagccttcagacctcgacacggaaaccccacccgggtctgcagccctcagacctcgacacggaaaccccacccgggtctgcagccttcagacctcgacacggaaaccccacccggttctgcagccctcagacctcgacacggaaaccccacccgggtctgcagccttcagaccatgacacagaaaacccacccactgcccaccttaaggatctcagacttggcaaccccacaattgtgtgagccaattcttagaatcaatcaatttcttcacacacacacatgaaaatgcaccgcagatgcacacgtgtgcaacataatcactcagtcaagcatacacatgcactgttacccccacacacaggcacactcacacccacacacacgcactccactcacacacaggcgcactcacacacacgcactcccacccacatacaggcgcactcacacagtcacacacaggcactcccacctacacacagtcacacacacacactcacacacatgtgcactcagctgtcattcctgtcagcctctgatgtacctgcagggacagctcattctgtgagcacctaggggttctggggtcagccctcatgtccgaggaggggtgttcaggggacatgaggcccactgtggcctctgcattctccaggtggcaccggggacctgaggaggccccagcttgctgccagctctctcgagcagaatgcagacacgtcccagaagctgaaagaaagagcctcgactgcatcagttggtgcgcgtgggcgctgacagtccagaacagcccggtcacggagcagccctggagatgcaggcccaaccccaccccctatgtccgcacaccctccctgcagcatgagtccagggacacccgcgactccgagtcctcaaccacccccgctccctgccaggtcaggcgtggggatgggggtctgggcccctcagtcctcccaggtgaaagccgggacaccaccctcacaaggattaccaggaggggcactgaccccaagggcacctggagaagagagagccgattccggggtgccgtgtgtgaggtccctgatggtggctcctttggagatggctggagaaccacgcctgtgattccactgtccctaaccaggccagcgactccgccctccctcaccacaccggcgactccaccgtcagcaggagcccagggatgaagggggcgagcaggagcggagcccgtgtattaatcatgctttcatattttctgtatctgatgctttgacatctggaacctcactagcccgagaggcctgcccctcccgggtgagtgatttcctagagctagtgagcacccccccagcgtctttccaaatgcaaaccaggcaacgagagtccacgccccaccagccaacgcgaatccacagcccactgcctctgtccttcactctgggctaccatcctcccacccaaccactcaggaggatggcccatgccccagagctgctgagacgatggaagccaggccccccaggcctgctcacccggccttgcccattcctggccacatccccctcataccctctgcctcctgtccagcctggtgcctcctgggtggccctgcctggtggtacccccttctctgggatccgtgcgtaacaaaccatctcaccaatggccattgtctcctggcctgctggctgcgctgtcctgaataacgataaagccacttggagaccagggcaggcggtggcaccctgttcctgctcagttctgtggcacgccattcctgctcagctcctgatcttgcagagcaggggatgcacacccgtcacagaggcccatctcactgttctacgcggatctggaagattctggctgacaggcaaagccagcgtgaggctgtgagagtggagaaacctgccggcctctgtagcaccctccgctggtgctgactggcctgtcagcgtcctcacctgccacgctgtcctgcccgtttaagggcgtttgggaggaaacgcgacacaatcgctgttggtttccagacgccgggtctccgcagctctgggtggctttgtggccgcttcggcagaacagacacaggtttcatcggggccctgcctggagccccagctctttctcgtggtttgcaggtgacacagcccaggctctcagggacaaaagtacttcctcgcacaccgagctgcaatttaccagccctcctgtcgggctgtaggccccacacacgagacacagtcagtttctaaatggaggccaggacgcggcgcccggcaccgcctggatgccactgcagcccggggaggattgctgggtgtggccctcgctcttggtgaggctgtttgtgtgctggcctcgacggagagcacaagcagctcctccagggagggcgtgcttcctccctttcccaagagcgctgccatgccagggcttggcgagtgcggggaccactccgagggccaggcaaggctagcgtggcccagggtccacttgatcctgcttgttggctccaagaccgaggttcaagaatgaagccagccctctttgtatcatcaggacacacatgccaaccagcacccgggtcccacgaggccgggctggcaccatcacagccaccacgtggctcacgtggcagcacagagcagccagtgggcatgggcggggggcagcctcgcatggccacatgggacccagcacgggacccaggtgccctccatcacctcctgggtgctggccctccctgactcacagcaggggatggagagggggtgagggggcggagagtagggttggggggtgcttctgggccaggcctgaggggctgcgtccccctccccaatcccctgtccaggactcagccaaaggactcctaagggacagtggctggacgtgtggagggaagggagacggtggcggggcacacacaggggcttgtccatgcccatctaatgatagacagagacatagagagacgtagacagagacacagaaacagagacagaaagatacagagacacagaaacagagacagaaagatacagagacacagagatggagagacagaggcatgagatagagacataagacagagacatgagagacagacacggagagagagacaaaggaacagattatagagaagacagagatagagatgaagacacagagaaagacacacaaacagaggaagacagagagacagagagaggggcacagccccttgcttctctccccacagggtccctcacacagggagaacaatgtggaggctttcctggaagggtcatttgctgacgacgtcctggagaccagcaccaagcactctcatctgcaggcaggacggtgcgtggcacagccgcaggcccagcgaggagccaggacctgggtgctgagcgcagtctgcagcctcggaggacggggtgttttctgtggcaggaatgggacagggagggggtccacaggcaggcggcactgagtgtcccccatgtccagctcctccctggtctccgctgggtgtcttccttcctaagatctgcgtgcccacgtggctaccttgggaggtgttccagcatctggggggatgagcagttttctctttgggccgctgactgggatgcccactcacaagactggagagaagccgtggctgcttctgtggccaaagttcacctcttcacttggcaccgttctgagctcgaggctttggctcccaggcagcctgtgaggcggcgtttctgggcttttcgcccttgtgggcagtctgcccttgtaagtgggaagaagaatttggggataacttggctctttcttgactgataggtttagctgtgtgacgaactgtgtgtttccttttgggtgttgtgatccactaaactgttataaaatctggttttcactttgaaaataatgaggatgagacttcacctctcaagttatggccaccatttgctcaagcccacctctcttccattttgccaatattccttggatacagtaactgatagaatgacccactcatccacccatttacccatctactcacttattcacccacctagccactatctatccacccatccacgcggactcatccatccatccatccctgcatccagccagccatccattcatccatccatgcatcccacccacccatccatccattcactcatccatctatctatccatccagccagccagccatcaatccatccattcacccatccatccacccactcatccatccattcctttatccatccatctacctactcattcacccacctagccactatctatccattcatctacatgcactcatccatccatccactcattcatctatccatccatccctgcatccagccagccatccattcacccacccatgcatccccacccatccatccatccatccctgcatccaaccagccaaccattcatccatccactcactctatccatctatccatccagccatcccccactcatccatccatccatccatccagccatccatccatccattcacccatcccatccacccactcatccatccattcctttatccatccatctacctactcattcacccacctagccactatctatccattcatccacacgcactcatccatccatccatccactcatccatctatccacccatccatccctgcatccacccagccatccatccatccgtccattcacccatccatccacccactcatccatccattcctttatccatccatctacctactcactcacccacctagccaccatctctatccacccatccattcatccacccacccacccatccattcatccacccacccactcaccactcatccatctacccacccactcaccactcatccatctacccactcatttgcccacctagacaccatctatctatccatcctcccacccactcatccagccactcatctacccatccatccaccatttatccatcaatctacccactcatttgcccacctagcgaccatctatcccttccttctttcacccactcatccatccacccatctgcattagtccctagaaccagcatgactctgtctgggcgctgtgcaaagctgtgtcatcaagatgaggaaaacaaccttagaggccaagcaagccctgtgttcccagcccaggcctccaggaaaagggttggatgcaccagaggtccaggctgacgcggacggaaacccaggcatcctgacccccaggttgtctcacctggtacaaacccaagaggtacctagtcagcactttccctttggcagaacggaatttcccctttaacaaaaggcagggcttcatattcactctggaggaaattgtgtgcatacctttgagagatttcattgaacctgatttttaaaaaagatttacaatctgcttagcgtgtccctgcccctggagcccaggtcggtttcgggaaatgataattcctctggtacggctgtgggtgacgccaccctcttgtcacacacatgcctcgttctgcagcagcgatccatcttccgggcaggatctgcctgtatttatcgctggaaaggcaaatcccatctcccagggcgcagtgggcgccattcatcaatgtccaacaggaaaccatctcttcctggatgacggaggtttcagatacaatggaggcgaagaaggcagtggccacagcattcccaccccagggccagccgttgtccagaccctcccactcacctcaccaaacactgagcatctcaaacaaatgagagaaacagcgtcttccttccaaacaagtggttctcaaagtgacccagtagcaccaatctcatctggaacccccaagaaccgcaaattcccagaccccacctgggacctgtggagtcagaagctccggggaggggcgccccgcattttgagctctcggggtgctgccgatggagccgttcgaggagagcagagccaagtgcctgaggcttctcacccggtcccacccccctccacacaatcatctgtccctgaagccctgtcccttgatcggcagaacgacacctggtggctttttctgtgattgcttctgtcctcaaacagatgaggatacagtttaggtcatgatttctgcagacccaggcccgctgcagctgtgacggatgaaatggtggggaagacattggtcagcaccacagacatagaaccctcccctgccgtttcagacacacagaaacgatagatcagttgttttaaaagttaaaagtaacattaggaaacaaggtgaaattctccatagctcatgaggagcagaagccggctgcagtgagtggcatggaagccatgaggctctggggaccatcggcgggacaggtgccgggcgtgtggctctgatgtccattggcggggacaggtgctgggcgtgcggccaggatcctggcatgaactcagggtggggacgagctcaatgagcaggaacagacactgaaaccagctctgatggacccctggggctgccgccagaagtgtcccatggcgagaggcagcagcacccgcgcttgggtaaggggaaggggcacctccccagggtgacacccgcccgggtaaggggaagggacacctccccagggtgacacccgcccgggtaaggggaagggacacctccccagggtgacacccgcccgggtaaggggaagggacacctccccagggtgacacccgcccgggtaaggggaaggggcacctccccagggtgacacccgcccgggaaaggggaaggggtacctccccagggtgacacccgcctgggtaaggggaaggggcacctccccagggtgacacccgcctgggtaaggggaaggggcacctccccagggcggcacccaccactgacttccacgtcaggagtcagaagtgccaggaggagacgctctgaaactttcttcccagagtgggtgctcatggagttaagccacaacttccataaaagatgagcactcagcaaaatgacaaggcagctggacgtggtggctcatgcctgtagtcccagctactcaggaggctgaggtgggaggatcacctaagcccaggagttggaggctgcagtgagtgatgactgtaccacaatactccagccaggatgacagcaataccctgataaataaataaagacaaagcacctgaggaaatccaattctaggagcgtcagccaagaaatccaacaaaattggtgaatttaaacccaaagagacagaaaaagagagtaattaaagaggtcttaggacgactgttagaatttccaaaggcatgaaggaatgagagaaaagcattaatcaaaaacatgagtttatggatcaaaacaactataaaaaaagaaccagatatgaaaaatacccatggaagaaagtctcctaaatgtaagatgcagtcagtaacttgagaaaccaaggctaagcaagtggctcgaattgctgtctggatgtggctgaagagaggacttgttccttggagtgcagaaccaggggaatttccagggacaccccacagaatggaaaggagatgagaaacaggaaggagacatcggcaaccctgagggtcaaagtcccacccacctccaacaagatttccacatggggaggccacgcactgagaaactaaggactgtccagatttgtagaaacacacagctggtgcctcacacctgtaatcccagcactttgggaggccaaggcaggtggatcacctgaggtgaggagttcgagaccagcctggccaacatggtgaaaccctgtctctactaaaaatacaaaaattagctgggtgtggtggctcacatctgtaatcccaggtactcgggaggctgaggcaggacaatcacttgaacctgggaggtggaggttgcagtgagctgagttcacaccattgcactccagcctggtgagagtgagattgtgtcaaaaaaaaaaaaaaaaaaaaaggtctgggcgcgatggctcttgcctgtaatcccagcactttcggaggccaaggcaggcagatcatgaggtcaggagttcgagaccagcctggccaacatggtgaaacctgtctctaccaaaaatacaaaaattagctgggtgtggtggtgggcacctgtaatcccaggtactcgggaggctgaggcagcagcatcacttgaacctgggaggtggaggttgcagtgagctgagttcacaccattgcactccagcctggcgacagagtgagattgtgtccaaaaaaaaaaaaaaaaaaaaaaaaaaagggctgggtgcgatggctcatgcctgtaatcccagcactttgggaggccaaggcaggcagatcatgaggtcaggagttcaagaccagcctggccaacatggtgaaacccatctctactaaaaatacaaaaattagctgggtgtggtggtggtgggtgcctgtaatcccaggtactcgggaggctgaggcaggagaattccttgaacccgggaggtggaggttgcagtgagttgtgatcatgccactgcactccagcctgggtgacagagtgagacgttctcaaaaaaaaaaaaaaaaaaaagcaagcaagcctgagatggacaatgtatgcaacgccccataacggaaaagaaaggaatccgcaaacgtcagggctctgtgatcagaggaattcgggggcccagaagcccaccccacagccgttcctggtactgcgctgctgggtgacatcgggtaaatgcaacccgcacttgctggaatcgaatttcagcaaaaggtttctcaggttcacatgggagagtaaaagcaagagaataatagtcaagaaagtcctaaaatagtaatggggacaggtttaatcgctagacatgcagctattttataaataattgtataaataatggcttagagtagaaagctcaagacagacagtggattgggtaagcctgtgacgagggctgctcttccgttcgcggctgaggatggagatttgatgagtgacctgagaaggcatcgtccaccatcttaaaacctgataaagatcagcagcttcctcatgtgaaaacacacaactccaaacggatgaaggcttttaatttgaaaaaagaattctacgagtatcagaaagatgttcagatggtcaaacaggcttccctaagaacgacagcaaaggcacacaccattaaaacgcacataccaggccaggcgcagtggctcaagactgtggccccagcacttggggaggccgaggcaggaggattgcttgaggccaggagttcaaggccagcctgggcaacatggtgaaaccccatctcctcacaaaaagtagatacagttcacagttactaattgatcccctgggctggagttcaaggtcagacgggcctttcaaatacaagcaaatgccagcctccctcccccaggcatcgatctcgtgaataaatcagcaatgacagccccgacaggcggctggcggggagcgggtgggggccatggccctggagtgggggtcgcggtgggcctgggtcggggccaagggagccacatccagtgtgggggctgcgggctccaggcctggtgtctctggagggggcctcggaaccggaggggaagaccccacagcgtctgcggagctccctgaggccccatagcacctgtcatcacggctgccagggagtcagctctgcaaaatcatcacagacgtggggggatggcgtctctccctcccccagccctttccccttccttccttcccaccttctttcctttcttctatctttcctttcaagctccaaacttgcactttgatttccttcaagagtccacccttatctgtacctggttaaaataatcagcgaaaaccaaagccatcccgaagatcgcccagcctcgcaaggtgtaaggtttcggggcatcaagcctggcctcggccagccacgcctcctgggggtctcccgtgtctaagtcttgctgtgcccccaatttcaagtcagtggtgatccctgtggtctatcctgggcatggcggcccctcatgcccgttttcccagggttggtttggctgtggtctttgtggcatcgggatgggaaagccatgtgggtgctggtcgtgtggcctcccacagcctggcttcctcccgcaggccccacagctgttcttatcctcatccaatctggtaaccctcgtatcctggatctctccgggtgctccatggcccatgggattccgcccaggtcctcttctccactggacttctcctccatctctcagggagcccagggctgccctgaccccagtgtggagcggccaggtctctcgggactgtggctgctgaggctgtgcaggcagtgtgggacccagggctggttggctgtgtcctgacctggagtctggctgccttcacgtggagctcctgtatctgccgtgtaccctcagctgccccaggccacctgatcacacccgtccacacctgttcatacctgtccacacctgctcacacccatccacaccagttcacagctgctcacacctgcccaaacctgctcacagctgcctgcacctgcctacaccttctgacatctgcttataccgtacacaggtgctcacacctgcccaaacacctgcctacaccttctgacacctgcttttacctgttcactgctgctcacacctgcccatacctgtttacacctgcacacagctgcccacacctgctgacacctgcatacagctgcctgtacctacctacgcctactcacaactgcatatacctgctcacacctgctaacacctgccagtaactgctcacaccacacacctgctcacaccacacacctgcccacagctgcctctgcaggagatgcccagtgtggtggttcgtgggtgggggatggggtcccctcccttctgctcaggcaaaggaaatatgtgctcagttcggggccacctgtgcagaattggtggggcctgacgcagcctcaccacgtggcatggaagcaagcccgggacagcgcttgacccgagcggacaggcatctgccaggcctgcggtggaggttggggggtggaaccctccatctgtggcatgtgacccaaaacctctgcatgagggacccccgtgccaggcctgcccctgctgccctccagcttcagggcctctacctctccccagcgtgcggcctagacccaggccctcaggaaacatctgtgaccccagcagacggggagccaggcaaggactctgcagtgggtgagccaaggtcaggtggaggtcacgtgtgtttcctgtggctgccgtccgccacgaattccacagctcggtggcttgaaggacatagtcatgaccttacagcaacgagcctggctgatgcttccaaggctaaggacgcgggcaggggctgcccaggacccaggagagaggggagagagggggcgtcatcccagagcccatgagggacacggccggctgctgggtccctcacggcggagaccgaggactcccctttgcaggtagctctggggtcactggcgagggggacagagctggatggggggcttcaggaggggccgggcagggggacgtggagacggcgcactcataaccctactacggcttcctgtaagggggagtggaggccggggcagcagccgcaggggcgacatggtgtcaaggtctcctggacattgtgccactgctggtgccagagagaccacggttttgcagatgcccaggacaggccagagggcggggccgtggcatggggaggggctgccctagggatggggactcctggcctggctgacctgcacctgggccagtggaaggcgaaggtgggcaggcctgagtgtgagtctcacatccatctgctgcgtggccctgggcaggtcactcagcctctctgggcctcagctcctccccagggctgtgggaggggccaggagaatgacagcctgattcctccgccccctcatctgcaggccacccgcccagggacgtgctaccatttacctaacacacgtctttaaatccacccaaaggataactgcatgaattttaacaggaaactctttatcactgccttaggagaggaccattatctcttgccaaaaatgagagataactgtacaaataaatacaataagatacacaccgcagttaaagtggttggataccacagtctggaaggctttgtcgtctgatggccgctcgaaaggtgagactgttcagcatcagaggtgctctagaacctggcctagattttcctcttgaaataatcagaaagcttagaagagaacgggggtacttttcaggatgagggagaattttttatcttcatgtgggggtgggggccacacagcattgacatctgtcagaacccaggagctgtgtgggggtgggggacaggcagagagagagagacagagagacacagagacagagaaagagacacatacactgagagactgagagacagagagacacagagacagagacacagagagacagagagagacacacactgagagactgagagacagagagacagagtcagagacagagtcagagacagagagagagacacacagagacagagacacagagacagaaagagagacacacactgagagactgagagacagagagacagagtcagagacagagaggcagagagagacagagagacaaagagacagagatacagagagacagagagagacacacacactgagagactgagatacagagagacagagtcagagacagtcagagacagagagacacagagacagagacacagagagacagagagagacacacacactgagagactgagagacagagagacagagtcagagacagagtcagagacagagagagacagagagacaaagagacagagatacagacagactgagacaaagagacacagagagacaaaaagactgggagagacagagacagagacatggagagaatgaggcagagactgggaggcagagacagatgcagagacagagataaagagacacagaaagactgagagagacaaagagagacagacacaaggagatagagtgacacagagagacagaccacagagagagatgcagagagaggggaatcatttcttgtgaggggcctggcctcaggcagccgcctgcctgggagctgctaggctgtctggtgtctggggagaggagtgatcagaggtgaagagtggctccccaacccaggcccgccgctctaaacacaggaagatccacagtccttgggcagtttatagaactgctccccttggggcctatcaggatgtgtggtcttaaatcattgctgtttaatattcaacagttgctccactgagaacaagcgtatttaggggacgttgcttgagaggaatctcctctctaaatggcggggttgagtggggtggtcgccctacaggtcagggatctggaatatgaccaagtcaggcgccgccatcgggctgggggtcaccgtgcccctccctgtagccccggcccggctctggcctctggccggcagactccagggctgcagggagaccccactgtacaccccatgctggccaggtggctggtgaaagggaccctttggcttccagcctccacttgttcagcgcagacatggcctcagaaccagccctcagaacggagcaagaatagccgtgcccagctcggaccccgggcggcactcactccagtcgctggcagtgctgctgtgggcctggcgtggccccagggctcagctgtgggctccgtgcgtggccccggggctcggctgtgggctccgtgcgtggccccggggctcggctgtgctctatgggcctcggacctgctcctcttcactctctgccgtgtttttcttcctcttttattctgtttataatttaccttatcttgctggaacccttctgtttcctgggaagttaccagaacctgatcaccagcagaattggaatgtgcagtatgatctatacatgtttacacacatgccacacacccttcccaaggccgtccctatacccattacacacacaccacacccccttcccagggccgtccctatacccattacacacacaccacacacccttcccggggccctccctatccccattacacacacgccacacccccttcccggggccctccctatacccattacacacacgccacacccccttcccggggccctccctatacccattacacacacaacacacacccttccaggggccctccctatacccattacacacacgccacacacccttcccggggccctccctatacccattacacacacaacacacacccttccaggggccctccctatacccattacacacacgccacacccccttcccagggccctccctatccccattacacacacaacacacccccttccaggggccctccctatacccattacacacacgccacacccccttcccggggccctccctatacccattacacacacaacacacccccttcccggggccctccctatacccattacacacacgccacacccccttcccggggccctccctatacccattacacacacgccacacacccttcccgggaccctccctataccaattacacacacaacacacacccttccaggggccctccctatacccattacacacatgccacacccccttcccagggccctccctatccccattacacacacaacacacccccttccaggggccctccctatacccattacacacacgccacacccccttcccggggccctccctatacccattacacacacaccacacacccttccaggggccctccctatacccattacacacacgccacacacccttcccttggccgtccctatacccattacacacacgccacaccaccttcccggggccctccctatacccattacacacacgccacacacccttacaggggccctccctatacccattacacacacgccacacccccttcctggggacctccctatacccattacacacacgccacacacccttcccggggccctccctatacccattacacacacgccacacccccttcccagggacctccctatccccattacacacacgccacacccccttcccggggccctccctatacccattaaacacacaacacacccccttcccggggccctccctatacccattacacacacgccacacccccttcccagggacctccctatccccattacacacacgccacacccccttcccagggccctccctatacccattacacacacaacacacacttcccggggccctccctatacccattacacacacgccacacccccttcccggggccctccctatacccattacacacacaccacacccccttcccggggccctccctatacccattacacacacaccacacccccttcccggggccctccctatacccattaaacacacaacacacccccttcccggggccctccctatccccattaaacacacaacacacccccttcccagggccctccctatacccattacacacacaacacacacttcccggggccctccctatacccattacacacacgccacacccccttcccggggccctccctatacccattacacacacaccacacccccttcccggggccctccctatacccattacacacacaccacacccccttcccggggccctccctatacccattaaacacacaacacacccccttcccggggccctccctatccccattaaacacacaacacacccccttcccagggccctccctatacccattacacacacaacacacacttcccggggccctccctatacccattacacacacaacacacacccttcccggggccctccctatacccattacacacacaacacacccccttcccggggccctccctatacccattacacacacgccacacacccttcccggggccctccctatacccattacacacacgccacacccccttcccggggccctccctatacccattacacacacgccacacacccttcccggggccctccctatacccattacacacacaacacacacccttcccggggccctccctatacccattacacacacaacacacccccttcccggggccttccctatacccattacacacacgccacacccccttcccggggccctccctatacccattacacacacgccacacccccttccaggggccctccctatacccattacacacacaacacacccccttcccggggccctccctatacccattacacacacgccacacccccttcccggagccctccctatacccattacacacacgccacacccccttcccggggccctccctatacccattacacacacgccacacccccttcccggagccctccctatacccattacacacacaccacacccccttccaggggccctccctatacccattacacacacaacacacacccttcccggggccctccctatacccattacacacacgccacacccccttccaggggccctccctatacccattacacacacaacacacccccttcccggggccctccctatacccattacacacacgccacacccccttcccggagccctccctatacccattacacacacaccacacccccttccaggggccctccctatacccattacacacacaacacacacccttcccggggccctccctatacccattacacacacaccacacacccttcccggggccctccctatacccattacacacacgccacacccccttcccggggccctccctatacccattacacacacgccacacacccttcccggggccctccctatacccattacacacacaacacacacccttcccggggccctccctatacccattacacacacaccacacccccttcccggggccctccctatacccattacacacacaacacacccccttcccggggccttccctatacccattacacacacgccacacccccttccaggggccctccctatacccattacacacacaacacacccccttcccggggccctccctatacccattacacacacgccacacccccttcccggagccctccctatacccattacacacacgccacacccccttccaggggccctccctatacccattacacacacaacacacccccttcccggggccttccctatacccattacacacacgccacacccccttccaggggccctccctatacccattacacacacaacacacccccttcccggggccttccctatacccattacacacacgccacacccccttccaggggccctccctatacccattacacacacgccacacccccttcccggggccctccctatacccattacacacacaacacacccccttcccggagccccccctatacccattacacacacgccacacccccttccaggggccctccctatacccattacacacacgccacacccccttcccagggccctccctatacccattacacacacaacacacccccttcccggagccccccctatacccattacacacacgccacacccccttccaggggccctccctatacccattacacacacaacacacccccttcccggggccctccctatacccattacacacacaacacacacccttccaggggccctccctatacccattacacacacgccacacccccttcccggggccctccctatacccattacacacacaccacacccccttcccggggccctccctatacccattacacacacaacacacccccttcccggggccctccctatccccattacacacacaacacacccccttcccggggccctccctatacccattacacacacaccacacccccttcccggggccctccctatccccattacacacacaacacacccccttccaggggccctccctatacccattacacacacgccacacccccttcccggggccctccctatacccattacacacacgccacacacccttccaggggccctccatatacccatttacacacacgccacgcccccttcccggggccctccctatacccattacacacacgccacacccccttcccgggtccctccctacacccattacacacacaccacacacccttccaggggccctccctatacccattaacacacacgccacgcccccttcccggggcccttcctatacccattacacacacgccacaccccattcccggggccctccctatacccattacacacacaccacacacccttcccggggccctccctatacccattagacacacaccacacacccttcccggggccctccctatacccattagacacacgccacacacccttccaggggccctccctatacccattacacacacgccacacacccttcccagggccgtccctatacccattacacacacaacacacacccttccaggggccctccctgtacccattacacacacaacacaacttcccggggccctccctatacccattacatacacaacacacccccttcctggggccctccctatacccattacacacacaacacacacacttcccggggccctccctatacccattacacacacacaacacccccttcccagggaccctccctatacccattacacacacaacacccccttcccagggaccctccctatacccattacacacacaacacacccttcccggggtcctccctatacccattacacacacaacacacacttcccggggccctccctatacccattacacacacaacacacccccttcctggggccctccctatacccattacacacacaacacacacacttcccggggccctccctatacccattacacacacacaacacccccttcccagggaccctccctatccccattacacacacaacacccccttcccagggaccctccctatacccattacacacacaacacacacccttcccggggccctccctatacccattacacacacgccacacacccttcccggggccctccctatacccattacacacacgccacaaacccttcccggggccctccctatacccattacacacacgccacacccccttcccggggccctccctatacccattacacacacgccacacacccttcccggagccctccctatacccattacacacacaccacacccccttcccggggccctccctatacccattacacacacgccacacccccttcccggggccctccctatacccattacacacacgccacgcccccttcccggggccctccctatacccattacacacacgccacgcccccttcccggggccctccctatacccattacacacacgccacacacccttcccggggccctccctatacccattacacacacgccacgcccccttcccggggccctccctatacccattacacacacgccacgcccccttcccggggccctccctatacccattacacacacgccacacccccttcccggggccctccctatacccattacacacacgccacacccccttcccggggccctccctatacccattacacacacgccacacccccttcccggggccctccctatacccattacacacacgccacacccccttcccggggccctccctatacccattacacacacgccacgcccccttcccggggccctccctatacccattacacacacgccacgcccccttcccggggccctccctatacccattacacacacgccacacacccttcccggggccctccctatacccattacacacacgccacgcccccttcccggggccctccctatacccattacacacacgccacgcccccttcccggggccctccctatacccattacacacacgccacacccccttcccggggccctccctatacccattacacacacgccacacccccttcccggggccctccctatacccattacacacacgccacacccccttcccggggccctccctatacccattacacacacgccacacccccttcccggggccctccctatacccattacacacacgccacacccccttcccggggccctccctatacccattacacacacaccacacccccttcccggggccctccctatacccattacacacacgccacacccccttcccggggccctccctgtacccattacacacacgccacacccccttcccggggccttccctatacccattacacacacaacacacacccttcccggggccttccctatacccattacacacacaacacacacccttcccggggccctccctatacccattacacacacgccacacccccttcccggggccttccctatacccattacacacacgccacacccccttcccggggccctccctatacccattacacacacaccatacccccttcccggggccctccctatacccattacacacacgccacacccccttcccggggccttccctatacccattacacacacgccacacccccttcccggggccctccctatacccattacacacacaacacacacccttcccggggccctccctatacccattacacacacgccacacccccttcccggggccttccctatacccattacacacacgccacacccccttcccggggccctccctatacccattacacacacgccacacccccttcccggggccctccctatacccattacacacacgccacacccccttcccggggccctccctatacccattacacacacgccacacccccttcccggggccctccctatacccattacacacacgccatacccccttcccggggccctccctatacccattacacacacgccacacccccttcccggggccctccctatacccattacacacacgccgcacccccttcccggggccttccctatacccattacacacacgccacacccccttcccggggccctccctatacccattacacacacgccacacccccttcccggggccctccctatacccattacacacacgccacacccccttcccggggccctccctatacccattacacacacgccacacccccttcccggggccctccctatacccattacacacacgccacacccccttcccggggccctccctatacccattacacacacgccacacccccttcccggggccctccctatacccattacacacacgccacacccccttcccggggccctccctatacccattacacacacgccacacacccttcccggggccctccctatacccattacacacacgccacacccccttcccggggccctccctatacccattacacacacgccacacccccttcccggggccctccctatacccattacacacacgccacacccccttcccggggccctccctatacccattacacacacgccacacacccttcccggggccctccctatacccattacacacacgccacacacacttcccggggccctccctatacccattacacacacaacacacacttcccggggccctccctatacccattacacacacaccacacacccttcccggggggccatcagggcccccagtggcctcagtgtccagtcctccccgtcctccggagctctctctggtgggggccccagtcctcctcgtcttccggagctctctctctctggtgggggccccacctggccgacctgaaggtcagggcatccactctttggggaaacgaagttgggttcgtaggggcagctctggtgttgttggtccttccctccagacaccacgtctcttcgtctggctcccaggagaccccagttctatttctatttctcccgcctctgtcatcccctcaaactgcttctgcatagcccccactctgcctctcaggctttaaccccaactgtgagccccacctggctgtcctggggccactgaactccacgtgtccatcgtggctctccccaacatgccaccacgcaccggctggcattctgtccctatgaaggccctgcctgcctggggactgggaatcagccgctgtcccagcccacccgtcaatcacccatcaatcaccggccaatcacccgtcaatcaccgtctcttgccagctttgcatcctaaatattttttggaagagtcccgtgtccgccacaccccacaagaaagaaagttcaccctactgggctcaacagtaaagatgttaatgaagggaagctttagggatgtgtggttaggggcatagggacagacgggggcagtgcaacctcaggggcggcaacgtgcagttctcgacaccggcagagtgaggcctcgggccggccactcggaccacggtgcagcttccaacaacctgtggtgcctccacgggccaagacagcctgcggtgcctccacgggccaagagcacaaggtgggaggagggaaggagctgggggactggaaagcggtggtcagcatctgagggcccggcagggctggggctagacgggggatgtggtgatggggctggacgggggggcgtggtgatggggctggacgggggcgtggtgatggggctggacgggggatgtggtgatggggctggacgggggggcgtggtgatggggctggacgggggcgtggtgatggggctggatgggggcgtggtgatggggctggacgggggggcgtggtgatggggctggacgggggcgtggtgatggggctggacgggggcgtggtgatggggctggacgggggcgtggtgatggggctggacgggggcgtggtgatggggctggatgggggcgtggtgatggggctggatgggggcgtggtgatgggggctggacgggggggcgtggtgatggggctggacgggggcgtggtgatggggctggacgggggcgtggtgatggggctggatgggggcgtggtgatggggctggacgggggggcgtggtgatggggctggatgggggggcgtggtgatggggctggacgggggcgtggtgatggggctggacgggggcgtggtgatgggggctggacgggggggcgtggtgatggggctggacgggggcgtggtgatggggctggacgggggcgtggtgatggggctggacgggggcgtggtgatggggctggacgggggcgtggtgatggggctggatgggggcgtggtgatggggctggatgggggcgtggtgatgggggctggacgggggggcgtggtgatggggctggacgggggcgtggtgatggggctggacgggggcgtggtgatggggctggatgggggcgtggtgatggggctggatgggggcgtggtgatgggggctggacgggggggcgtggtgatggggctggacgggggcgtggtgatggggctggacgggggcgtggtgatggggctggatgggggcgtggtgatggggctggacgggggggcgtggtgatggggctggatgggggggcgtggtgatggggctggacgggggcgtggtgatggggctggacgggggcgtggtgatggggctggacgggcagcatggtgatggagttggacgggggcgtggtgatggggacaggtgagtctcctgtccctcaccaggagaactgggttctggttctcagcctgtctcccaccgtagagcaacctctgaccgccagacaggacaccaaggtgaaaactttcaagcccccaggacgggagagaggtcagggggagaggtcgggggagaggtggcagggagggcagggaggtcagggagtggagtaaacgctgggcgcggccacagctgtgccttgtcaggggatgaaggtgaaagacagaacccgcggtgacacaggctcccctgccccgcggaggagtcaggccatcagaaaggcccctatgtcagccaggcgtggtggttcacacctggaatcccagcactgtgggaggcagaggcgggcagatcacctgagctcaggagtttgagactagcctgatcaacatggtgaaacctcgtctctactaaaagtacaaaaattagccgggcatggtggcatgtgcctgtggtgccacctacttgggaggctgaagcaggagaatcagttgaacccgggaggtggaggttgcagtgagcagagatcgtgccactgcactccagcctgggcaacagagtaagactctgtcttaaaaaaaagaaaggcccatgtgtcatggagacgggagggaagctctccaacggctgcagccagggccctctgtggtccggcacccacacccccagcccagcctgctgaccctcgcccagccagggccctccgtggtccggcacccacacccccagcccagcctgctgaccctcgcccagccagggccctccgtggtccagcacccacacccccagcccggcctgctgaccctcgcccaccacacaggttcgctgtcgtcccggctttgctctgagcctgagcctgggatgcacccacgacccagcctcctgggacctcctctcactgcagctgggtttggcccacgggagccgattttgtttggaggggaggtgggcgtgtttctcccctgggcccttcctgctgaggcgacttgtctttcactgacggtggctctgtccccaggaccacatctgctgggtgccctccaccccaggggtcccgtcctccctcgctcttcggcctcggtggtggctgcgcactgccggtccccggcaccctccccaggctgtcctcctcgtctctgcggtgcgttccatccctctgagggcctcggctttcttaggcccctgactgctggcctggtctcctgccccacagggtgagcatcaggggagacggtgagagaagccgacacccgcgtgggtgcgttcaatccacggccgacccgccaaggtctggtgtttaacaatcacagcagttaagggaagtcagaatattaaagaacctgccagattaacttccagcttccattttaaaaatgtgtaattgaggattgattctagatgtgcagtttaaaatcggacaggatgagaggattaaaggcacctgcaaacagtcctgacatccttcacagatctggtctcaattcaatttattaaactagatattttaaagcacttggtcggggggatttctggtatgatatcaggcattcaaagtgattaaaagaaaataaaacactatgtttgtaagtgccatttttaaaaggctcaagggactttaaaggcacaaaagcagtgaattctgtttcacggtattattttattttattttatcatatattttttgaaatggagtctcactctgtcacccaggctggagtgcagtgatgcgatctcagctcactgcaatttccgcctcctgggttcaagtgattctcctgcctcagcctcctgagtagctgggattataggcatgcaccaccatgcctggttaatttttgtatttttagtagaggcagggttttaccatactggtcaggctggtctcgaacttctgacctcatgatccacccacctctgcctcccacagtgttgggattacaggcgtgagcctcagtgcccggcctcacagtattatttaatctgcccaacctgagttaaacaatcgcggccacggggaaggaggccgttttattgattgaatttgtgtccacgatagtacgatctttaaagtgaaccgcaagcttacagcacaggttttgaaaggtgcaacttaataaactacatataaatttttaaaactagccttaactcttttctgtgaatagaagccccatgggcaaaacacaaaggaaaccaaacgaaactccaaaataaaaaacccgcaacctccaaaataaaaacctaagaagcagaagcccggccgagctcagagcctcacacggacacggtcccgggaggcagaagcccggcccagctcagagcctcacacagacacagtcccgggaggcagaagcccggccgagctcagagcctcacacccaccctctgtgccgaaggacccacctttccaaggtcccaatccattgtcacctgggggcaattcataaacagcaaaacaaagggcatgaaaaataaagtagacatgggaaatgccatcttttgtgattctacaaaatttctcagtgatgttgccactgagcttctagcaagactcagggtagccccatctcactgtccccaactccagctcagggaccctgggagccttggccgcccagcttggcttccagctgcctcagcctaggctctggagagggctcagtgcgctgagcaggagccctggacctcaccctgtccctagaccatggctgcactcgccctcaccctgtccccggacactgcagccacactcgccctcaccccatccccagacgccatggccgcactcgccctcaccccgtccccggatgccgtggccgcactcgccctcaccccgtccccagacaccgcggcctcactcgccctcaccccgtccccagatgccgtggccgcactcgccctcaccccatccccggacgctgcagccacactcgccctcaccccgtccccggacaccgcggcctcactcgccctcatcctgttcccagacgctgtggcctcactcgccctcaccctgtccctggacaccggggccgcactcaccctcatgcccagttctacgttctcgccgccatacacctccatgccggggtccagcagcccaatgtctccgaagtactcgcggtccactacgaaggagcagccgatcatggctggggtcctgggaggcagagacagcggcgtgaggacctcgccatgcaggcctgagccctgcctgctgggccatgagccaggaaagcctggaagaccccaccacccctccctcctgtgcctcctccctgtgcactcaggtccctgtgctcaaggtgaggggccgctgctcctccagccaccaggacttgagtcccttggagcctggttaagccctcagcccagacagcgtccaaatgctgaatgccaacagatgacagaacccgcattcaattcagcttagtgtaggaggtttaaaaaaagatcaatcggccggcacagtagctcacgcctgttatcccagcacttagggaggctgaggcaggaggatcactggagcctgggaattgaggctgcagtgagctggtattgcaccactacactccagcctgggcaacagagtgagatcctgtctcccctctcccctgaaaaaagatcagtttacctaaggagctctgtggttgccttgaacatcatttcccaagttcgagtgagtcacttgcccgcctcccccatgcttcatcctaactgtgtatcaggagccaggactgcaatgggcagttgcgtaggctgtgcactgctcaactccacagaaccttgttgatgacagattctgaacgacgcagcttggagctgagtgcacagcctgtgcagctatgtgccacagactgccagctgtactatacttcctgtaataattctaaaacgtcagccgacttagcctggccccatctctgtgaaatcatgcattggtatgctagttatattttttctaatatgtattgagagtgcatcagtgctgcaaatcccctgggaagaggctgcatggacagcagtggtgaaggcaggatccgcggagcagtgaaggcaggatctgcggagcagtgaaggcaggatctgcagagtggagcgggaggataagctggtgtgccattgtgggccacgcgacgtgcgagctcattcactcatccctctcaggtttctactgggtgtctggaaggtggcggggattgaaaaagaggcaggaaaatcacatctccagcaaggagcaggcagagtctgtgtgttgtaaggaaggaggaacttctcatctttgctgaaagattttgcctcaaaacaatttccttgtccgtggagagcttcatttcttctgaggcctcaggagctgtcagaggaagcagcaaagcctcacgctatccccagatgccacggcaggccgccctgcaggccttgagcttccctgatcctcctctgcgtatcaacgcgttcttccataaaaacaacagcaaaagttggcctctgtcataatttaaaggaagcaattctgtccccagagactcagcagtcagaaataaatgcccatcgattgtccaagaatagcaggagcattaaaaagcaattgtccttttatttgtgcaaagatccaatttgttctgtcattagatttcggccacaaacctaacagtgatgaaattttaatacccccccttgatttttaatagcaacctttgattgggtaagttatagtttatcatatacaacaggtatttctcctgttttcttaacaacaaccatcatttcagggtgatctctgatgaagtgaagagccagattctctgccacatctattgtagcgggtagcgtcttttttattattgctcagagttctaaaataaagcccatgaggcaagggaggcagcaccagctggaactggattgacttgccggagagatgcctgctgtgattacagaaaaaggtgggctgagggttctcaggctcgcgtggggctgcctgtcaccgtggtgacagcctcccctcggggcggttccgccacacgcggggcacaggggtgcagggtggaggccccaggtcctgcctgctggagctgctctgcccgatgcccgcacctgccctccagttctcagcttccggggccttagtccagccggacgcctcttgttagcatcagaagcgactcagcccagcagccacggagggacaggtggatacatggagagtggcccatccaggctgtggaccgcaattctgcagtggaaggagcgaggctgacacagcctgcgacgtggaggaaccctggaaacgtggcaccgagggcagggagccaggtgcaagaggttgccccccgtgtgactccgtccgcatgcaaggaacagaagaggcaagtccacgggggcaggaagtggattcgtggatgcaggggctggggcggggggaacggggagtggcggctcgtgggtgtggggtccccacggggagggaggacaatgctttggaacgagacggaggtggcagctgcacgacactgtgatggtcgaaacaccgcagaggtgcccactttagtgtggttgatttgtgttatatgagtttcaccaatggcccattgagtgctttgatcttccacagaccctgataacaagaaaagccaacgtggccgggcacagtggctcacgcctgtaatcccagcactttgggatgccaaggcaggcagatcacctgaggtcaggagttcaagatcagactggccaatatgaagaaactccatctctactaaaaatacaaaaaattagccgggcgtggtggtgtgcacctgtaatcccagctactcgggaggctgaggcaggagaatcacttgaacctgggaggcggaggttgcagtggactgagatgacgccactgcactccagcccgggtgacagaggggattccgtctcaaacgacaacaacaacaaaggctcagctcatgccgaggtaagacggcgaggaggcggtgggcaccgcccgtgtgggtggagtcgggacccacatccccggaggcctgcggtggacctgtcgcctgcacacgtgcacagggaggcctagtgagcccggtgcccgtgaacctgggataggtacgtaaacagcagcgcgcgcgtaagacacaatccacggagaagctaagacaagggcaccggagccgcgtccttccacacggagtttggaacacgtcgagaataacgcacactgaaacctcgccgtgcaagacccaagcggtgaccggcacacggtacacgtacgtgcagatgtgcgagccacaaacgcatggaaacatcacccgagagcttgattatttacatttctttcacattcatttgattttatgaatttcgatcgatacaattttaactttggtttcagtcaacacttgccaccttcaatcagaggcactgaaacgaaaagttaaaattaaaactggagtacgttaaggatgaaaagcacaggaaggcatgtccagttcacgacgccggttacggggcaggaagctgtgaaacaggccggtgctctgcgtcttggggggctcccggcatccgctttccggggaggggagcggctgctctcgtttctgtgtggcttgtcaatggggttggggtcgctgactccttaaatccttggagctcagggctctgcaaggccagctctcagaggggactcctccgggcccacaccgccctcccaggtcctcttctgaccaggagaggtctcagggacagcaccctgttctttgttcctcgggtgaaggagaaaatcaggggtctcctccccgcaggcccagcccccggcagacagggctctgcaagctggagggccctggggaatggaggtagtgcttggggttccagagctttggagggaataatttccgagtggttctcaggtgggcaggcctggtgtcagcacagcccttgatcctggaggggctggtggcacatcagcagcctctgggcacccacagcctgggggccccacctcttcctggaggaacacatgtccccaggtgtcctccgaagtcacacttgaaccagcagccccgatgagagccagctcccccaggcctgccccccgcctgccaggctgcctgtccttcctgccgttctcccaccttgctcacgtgatgggggtgccggatcttaactgggatcccaggaatcctccgtgatgaggatggtccccagcgtctgtctgggagaaaggagcaggggagcaggaagaggactagaacagggtggaggccaacagggcagccacctccacaggcccaggcagtgaggccacactcctgcctaggactgtcccattgaagctcaggtgcttcaactctgcagggagcaaagaggcctccaaagatgagccacaggcggctgtgaacgcaggaagggcagagagtcccaggcacatgggcacctcctgcagccgcatccccgccacgactgaagccttcgtgtcttgcggacgccgacactgacatttaatgttatttaaaaactgtttctgagaaggcagagaagcacgtgccacgttttagaaagagtttgcatccacaatggaaagagtgaaatgtagggtccagccctacagggcttagcgggtgttctccccgtgtgcagagacaagagattgtcagaaataaagacacaagacaaagagataaagagaaaacagctgggcctggggggaaccactgccatcaagacacggagacctggctgggcgcactggctcatgcctgtaatcccagcactttgggaggccgaggcaggcggatcacctgaggtcgggagttcgagaccagcctgaccaacatggagaaaccccgtctctactaaaaataccaaaaaaaattagccaggcgtgctggcacatgcctgtaatcccagctactagggaggctgaggcaggagaatcgcttgaacctgggaggcggaggttgtggtgagccgagatcgcaccactgcactccagcctgggcaacaacagcgaaactgcctcaaaaaaaaaaaaagacacggagaccagtagtggccccgaacggctgggtgcgctgatatttattgcatacaggacgagggggcagggtaaggagggtgaatcttctaagtgattgacaaggtgaagcaagtcacatgatcacaggacagggggcccttcccttttaggtagctgaagcagagagggaaggcagcaaatgtcagcgttttcttctatgcacttataagaaagatcaaagactttaagacttccactatttcttcttctgctatctactacgaactccaaagaggaaccaggagtgcgggaggagcatgaaagtggacaaggagtgtgaccattgaagcaccacagggaggggtttaggcctccggatgactgcgggcaggcctggagaatatccagcctcccacaggaagctggtggagcagagtgttccctgactcctccaaggaaaggagactcccttccacagtctgctaagtaacaggtgccttcccagacactggcgttaccgcttgaccaaggagccctcaagcggcccttatgcgggcatgacagagggctcacctcttgccttctaggtcacttctcacaatgttccttcagcacctgaccctataccctcaggttattcctagattatattagtaatgcaacaaagagtaatattaaaagctaatgattaataatgtttataataatgattgataattgtccatgatcatctctatatctgacttgtattatgattattcttattctaactattttctttattatactgaaagtttgtgccttcagtctcttgcctcggcacctaggtaatcctttgcccacagtgaaaattgttaggacttaaaaagtgaggtggttatccctgcacctaaagttccattccccaaagagatcacggaaatgccgtcctggagcagggcccacactttctctgcccggggcaagtgtgtaaatgtcttggctctgtgccagaagcctgggtggcagctgctcccctctgccctgatatgcaaatgaggaaacatggccgtgtgtcaataaagctttatttacaaatacaggactgtgggccatgattccctgacccctgctgtacatccttgaaaatgcccttcactgttttttcttttttttttttttagactgaatttcgctctcgttgcccaggctggagtgcaatggcaccatctcagctcactataacctctgcctcctctgttcaagcaattctcctgcctcggcctcccaagtagttgggattacaggcacctgacaccacgccctgcgaatttttgtatttttagtagagacagggttttgccaggctaggaactcctgacctcaggtgatccacccgcctcggcctcccaaaagtgctggaaatacaggcgtaagccaccgcacccggcccctccgctgcttttaatatgcatatttacttttatggaaattttcaagtgtatgcaaaaggagaaagatgagcagaatgtgttctcagtttcagcgatgatcagcatcgtgtccttcttatttttttctctcgcctattactcctgatcctccagcatgaggggagtgattctgacagggctcatgtctctgactctgatcctctatgcgagaggagtgattctgacagggctccagcacgtgactctgtgatcctccagtgagtggggagctgatttctgatggggctctcgcccagactttgatcctccagggtgagttttgacagacaaacttacacgaaggtcaggcaggtaaagtacaagagagaagagggctagtgtcacttgttgaacatggtgaaatcaaagccttcatcttctttttcttgaaatagtcagtcctcttggtctgtccctattctccctctcccgtaaggacccagctctagagaattatttccccaagtgaagcagcagcatcagcaaatgataaacaatacaggacagatgggcttgccgggagcggctgttgggacaggtggtgactgtggctctgctctgtccgagggagcagccacagctcagcttcagttcatcatgactgagtaagaattggggcctagaatcttccaattttcaaaaagagtagaaatcattttcacataaaataagatttcaagtgaaaatgattaagtattggttctgtcaaccaagaataaaattctaagacccccaaccaattgaatggagccgcttctcaaccaagggcaccccaaagtaacccaggaaaacgagctcaggtcctgatgggaagagggtttggacaagccccttagactctcctccctttggaattctggaacactaaaacacagatgttaagtctgaccaaacagactcttttgtagagataaaatgcatccaaaatgacagttagcaggtccctaaagaagttaagtattttaccccaaaatgtatttcattgatgtattttgaaatggcttgcaatgctgtgtcttgtgggggaactcaacattctgtagagacttccctttcttttggaggtcttttctgatccagacaagattaaccagaagtctggcccctttttaagtctgataagaaacatttacaatctcctccttctgaagctccttctgaagcccgctacctggaggcttcatctgcatcataaaaccttggtctccacaaccctttatcttaaccagatgctcctttctattcataccaggtctttagataataacttaactctttcaaccaattaccaatcagaaaatctttgaatccgcccatggcctggaagtccccacttccggtcctcccgccttttggactgaaccagtgcacacctgacatgtgtgcattgattccttctccctaaaacatacacatccagcaggctgcacgcctgcacgctaagcatggaacgcaggggcactggccgcgatgacaacaccacgtggacccacatgcgcctttgcgatcgtcacgctgggtgtccaccatggaagccgtcctggaacttctaacatggccccatctcgttgcggctgtctgctgtttctgtccccatgagggagggcgaactcctgagtttacgcaatccacccacctgggcctcccaagtgttgggattacaggcatgaaccaccgcacctgccttaatatttcatttattctttaaaatcaactttgaggggtgaaatttatataaaatgaaatgcatccatgtgatctttgcattttggcccattttgactgatggagacccctgggtgaccccatccttttccagcagagaacactgctgccctggaactgtcccaggcaggccccttccctgtgagccccgaccctcagcctccacccaggatgaattttgccttccgtggaattctgtgtgcaggaatcacgcagacactctcttccatgtgtggctccgaggctcagcatgagcctctacatctcaccacgttgttaggtgtggaagggtccactcctccctgtttctaagtattccgtgatgtgggtggagtctgccctgctcatccattcacctgctgacgcatatgaggctactgtgagtaacgccgctgtgaacgtttgtgtggaagcctttgcatgtacgcatgtctcatttattttgagaaaaacacctgggagtggaataggggggacactggaggggggacacgggggacactggaggggacagtggagggggacagtggagggggaacactggagggggaacactggggggacgctggagggggacactggaggggggacgctggaggggggacactggaaggggggacactggagtgggtttcgggccttcagaaggagctgcgggttttccaaagtggctgcaccgattcacagtcctgccagccatgtccgagagttgcatctgtgccatgtccttgtcaacatttggtattgtcagcctgcacctttcagccaccccagtgggcacagagccccatctcactgtgggttgaatttgcatctccctggactgtggggagcacatttcatgagcttgctggcgcaggccagtcttctcctgggtagtgtctgttcatgtcacgccctgtcctttagctgagagctggaacggggggtttcagcagctgtccaggtggtggctatgaggagcaggggggcagccatgccttgaagacttgatggggccagtgagcctgctcctgccacagctcagggcatccagagcctgccaaaaactgtgggaggtgcctcccattgggttctctgaatttcactgatttttaaaatgtcaaacacaaggcgatccttttcctgctaattggggattatcaagtgcattttgaatgaagaaaaataaccttcaagccgttagtactggctcctgtgaaccctgagggctgcgtctgcatctctgtgatacagacaagctctgtgtgccaagtttttatggcaaagcccaggggccccagcacccggcccgacactcaccgtggtctctgctcagcccctgcaccaggttgtgcttgctgggggacgtccccagccctcgtccccacgccctcgtccccagccctcgtccccacgccctcgtccccggccctcgtccccacgccctcgtccccggccctcgtcctcatgccctcatccccacgccctcgtccccacgccctcgtccccagccctcgtccccggccctcatccctggccctcgtccccacgcccgcctcgctctgctccgctccttgccgggcagggccgccctcgacccctgagggcgcagctcacctgatgggtgctgactcgtcgccgcggtccagccagtcctgcggggggatgatgtacatgcaccagaggccccagttgtagccatgggcggcgttcgcatactgctgcacctcaaacgtgctgtacttgatgttgtcgatggctggcagcacgatgcgacgccggtcctctcggatccgcgacagtgcgggctcggccctgcggaggcacagctgtgaggaggggcggccccagcccaccgcattccctgaggagggtccactcgcccacagggaggggaggccagtccccacctggtctgcatctagccctgccaccccctgctgagctagacccacatcctcccttggaagcccaagggcccctctcagcagcagacccaccctgaccaaggcctcacccctgctggggtagcccctcgaatgccactggcccctgggggacgctgacaccggccacgttggcccaactgcagtatctctgaagggctgcccaggggtccataagaggtcagctatgtccaccacggggctccccagctcggtctccctctctgcccagccccgagtccctcctctcctttcctgctcctgtgggagctgcattcatttgcaagaattaattgaggatctactatgtgccacgccctgttcccacaaattggaatacaatcatgaactaaggaataaaaacaatccgtgccacggggagctcgcacggtgtgggatgaaaagccaccaggcaccgttgtgcagtgtggaacctgcgtgagtgtgcagcggccccgctcaaggacgggacggaggatgaggtataagcagtcgtggatgttgtagagggggctcacagttttaagtagggctgccctgggtagtgactggaaggaggcatagagggagtctcagagggtgcggcagctgcaccgaagccccggcgtgtgcctaatgggcctgcagggctggccaggaggccggacagagcgatggggcaatggggggcgaggagggcagagaggaaggtgagtagaagcagcctcgatgggcatcagctcagtcttcgattccccgtcccaagcaggggtcctgggaagcaggtgcagccctcgcccttggagacgccatggtctaccgcaaggtgagatggccgcggaggcccgccgtccacgctggagacccacagggccaaagccacccagccactggctgacacagagcccagaggctgcagtgagaggctggatggcctgagggcagattcgggtcggctcaggcagagccggcatggggagaggcaaggccctgaccctgcctgtgagaccacacggctgtcttcaccccttcttcccgtccttctgagcatgaggcctggtatttacctgcctttcagctttgtgaggaggattaattaattactgttagcgaagtgcttcagagatgaaaagctccctggaaatgccaggtcttctaataaggcagaatcctttgtggagacagttacgggagggggtgctatttgcagatggataactgggttttcagttgtgaaaattaaatttggaccggtttaaaattgcattttgacgtgacagacccaaggctcccccagacgccctcaggcctcggggagcttacccggcatcagagggactaaaaggctgccggtgtagttgtgcagtgcacaacgtgtgcgactgcatggggtgacattgtggggggcagacagtggaacacaattcatgcacaacacgtcagaagctgataaacatcgagggaaaggaaagcgccctgcggaggagcgaggaaggggaagggagggcacagggcagaggaggcagcgtcttgtcagaacagcgccggctggggactgagatgccccaggaaagccgagtgtgaggggagaagcctgagaggtgccaagtccccacttgaacccactgatgctgttatggaaaccacggactttaagaagccccaaaacgccaggttccccggggacccagcaggaggcccaaggtcacatgcagtggggtgtcccagccaatcatgacagtcccagcctccgtgtaacactgagatcaaacatcagctggcccttcccaccaaggccccctgcagtgacaacagcccatatttccctgagttgaaaaatgagtcaggagagttgatattaaatcttcagttttggtttctccaggaagtggggaaaacggcctcccgggtcttccttgtggttgggtggacaggggtggatcctggccctggtgcagggaacaccctgagcattgtgggtgcggggcctgcctgggtgcggggaacacaccctgagcattgtgggcgcggggcctgcctgggtgcggggaacacaccctgagcattgtgggtgcggggcctggcccgggtgcagggaacacacccagtgcactatggaccccgtaggtgccctctgtggggctggctttggggtttgcctgggggcatcctggactgccccaactctaatgacaagggtccttgcataaggcagggatggagaaacagacacagggagggcgtgggggtcggaggtgggggctgcagccctcaggagctgagagaggtgggagggatccttaagggcctggagcctctgggggaaactcggccctgcccacaacttggagtccggccctgcccacaccttggagtcgggctctgggcctccagaacggtgaggaggtgaagtcttgctgctccgagccgcccagaaggggttgctttgtgctggtggccccaggaccccatacacaaggtgaccccctcagcccagaagctcacttcccacgccccttgcactaggctaaggcctcgggggcactcgtggccatctccagtgactgagcagggcctgagaggccggacttctgcaccttagccccaccccacctgatctgaggttcccaccccgcgggggacacacggtacccgagcctgctggagtcaggacggggtcacattctcctggggcaaggtgggcacagaccaagcctcatacacatgcctgggagcttctaagcgccatgtccttgggtgcgtgctgggcctgccctcccgtggttttgcattcaggagctggacacagagaggccgcagaggtaaccgcacaggtggactcagtggtggctctcagtcccagatcctgaaggctacggcgagtctcccagccccggggccaacccagcggccaggctgcagccgcacggcggcttaggagggggatggtggagggggacccgctgagactggctgtccagcctgttccggcccttaccagcccgtgttgaactcgacgtgggcatcaaagaagccgacgactggggcggtggccgccttccagccctgcagccgcgcgcggatcagtccttcccgccggctgttgcggacaatcttcacgaggcctgggtaccgcttgttgacgtactggtccagattgaacttgagttccactgaggagagacaagactttagcacgctggcaggtgctggcaggcgcggggccaccaagacccaaggctggaaatgctgcgtgccgcgtgtgggatgggtgtattgtaaacattctcttaggacccactgaaccacatgtggttcagcgtggaggtcacagagagatgagaccccagcctcatgatgctgacattccagtgggagacacagcaaataaggaaacacaccagacagacagacagacagagagacagacagcagcccatgctgtggagacacaggactgcagtcagctgtaaaaaaccaagtccatgcatggatgggtggacacacaaacgtggccttccatgctgggggcagggtgtcctgatggagctccctgtggccaagggcaagacacaggtagccgagctggactggatggtcctccccacacaccaccttctccagcgagacagggctcaggagggcagccacgccattcagtcctctgcacacagaccccagtgtagacggtgctgctgggctagggcactgctgcaggccagagcttgccccacagccccatggcacagcctcctgcctccacgaggggtcaggaaggggctccccatgttttcctccatttccagagggagtgtcacggctgcaggctctctgctctgcgcctgggaagggcagatgggggacaggcctggggcagtgcaagatccttgtttggggtttcaagcctgtgtgctacagggtgtgagtagcactgccctcaggggacctgaagctgaggagggtggcgctgaggaaccatggggcttgggctccagctgcgagctctgtccagccaagctctggtgtgagcctctgtgggcaagagaggtgggaggcgtgactggcactctggagagctcagctctactggcctctgtggaagggggtggctgaccccaacttcatctccacccggagcctgagaggagaggaagcagggactttgtagatgtatccggttgagtatcttgagatgaaatcctcctggatttggggtgagctctgtgtctagtctgggtcctcatgagaagaagagaggatgcagacacatgggagaggccgcataatggaggcagagagaggcactggcagccacacactggggacagcacgtacgcagccatgacagaggctggaaggcaggagggacccccataggtttagagcccctgcggacagatggggtgcagtcctctgtcgctctgcccccggaggctccacccaaccccaactcaacccagccacaggcagccgcccggcgagcaccgtgccgaggccccgcccactcaccgttgtcactgttgtcgtccaccaggatgacctccttgaggagctgggagggcgtgtggttgaccacgctgtgcacggagcgcaggatgaccgacagcgcctcattgacgaagatgaagaccacggagacctggggcaggtcctgggcgtagctcatctgtctgcacctgcaggaaacacggtttggggtgcggtcagggcgcagcatgagggaccccggaagccatagctcatctgtctgcacctgcaggagacacggtttggggtgcggtcagggcgcagcatgagggaccccaggagccatagctcatctgtctgcacctgcaggagacacggtttggggtgtggtcagggcgcagcatgagggaccccgggagccaggtgcacccttcgagggtcactggacaaggcctggaccctacaaccagacgccaagggtgtacgggggccagagctgttccagagagaaactagtaacagtaacacagcactcagcacacacatggcccctgtgcccaccccgtgctcacagcgaccccgagaggagatgaacgtccccgttccacagacaggagcctcccctgtgggccatgagtgcaggtgcttggattccaaccccagccatcagcttcaggagcacgttggggacggcgctgctgggcacagccgaggagctgggcacagccaaggagccagccacccgcacaggcagccacttcccgccctggctcatagctggttccaagcctctggtgagaatttcaaagggacaagggctgtgcgccaccatcatatttatctgggctgtggtgctcagccagggagatttcatcactcagaaaaatgctttctgacaagaaaacgtcactccactcatctgtagaggaaaaagcttggattgcacagttttcatgaacttgcaaaatgtgtaaaacagaaagtcctgagaaaggaagtacgtcctaggacggactgcaggagcggctgcaggttggaaaggagaggttttggagttggggtggtgggcagaggcactcccagagcccagggggaggggggcagggctgctcagaaagcctgtggcaagtcctgtcccatggggtggcccccctcaccgtcctcaagcgcacaccctgtacctgtttgttcctgcaggtctgtctccccccgtgaccggaacgtgagcgccctgacagcaagctccttttctgtcccattgacagctctataccaagaacccaggctgtgcccggcacacagcaggtactttataaacatctgtgtaatgaggggacaaatgaagactcaaggggccccacaggcaccggctgggcccgtgaagtactcacgcctgccccctacgcctcctcggagcagtggaggaagctgctggcctctgggggacagtggtggactccacccttctttctccctccatcactaggtcaggaggcgtctcgggcctggctgcggggccacatgcacctgtgctgaagaacttgcaagcagcaaggacaagtgatttatggcgtgaccgttcccgggggcctccagcctcttcagactttacgagggcaggtgggggcagagaatccctgtcacctacagcactcattctcaatgacctctcatttgatttagaatccatgttcggtacccacttcttgccccagaatatcgacggccttttattgatggatctcagcggccactcgctttataaacaagccgcctgcatggaacagaaggcctccctgcaagctcatggcacaggtttgagagatggacgcagaggcccccgggacgctggccacgcggagaagcgtgtgaggagcccaggagcgatcagggcaacagaaccttccagatgcatcctctgctctccgctcagcagcaacatgaagaagccgagccgggatggcctaagcaggaagggggctggtggctcatccgtaggaaaagtccaggtgtgtttggtttcgggcccggcttggtcgggggtcaaaacttgtcagtgggacacaggcttctgcctgcctctcttggctccagccttctggcttgagtttaatctcaggaaggcctgtccgcatggccggaggccgtgtccgcgtggccggaggctgtgtccccgcaggtccaaaccttccaggggtttgagtccagggcagcaaacccacctgtcttcccaggacacgcaggaaaagcatccctgtgtctgctgggctctgattgggtgacgtgctcttccctgaaccaatcgctgtggccagaggaaatagggcactcagattggcttatgctccaccgcgtcatgctggactcagggcctggcaggtgcggctcctagaagtggggcccgtggatgctggaccagccgtcagcagatgttcctgacagggagcagcgccagggtccgatccaggttcgagcccaggcgcccacaggcgagaccgacagccattgggagcctcagtctccggcacaatgaggatcccaaccgcgtccgcctcgcaggtcgtacgagggagatcctgccaggtcgtttccacacgcgcggagttgaagcgtttttatttaactccctgtcgcccacctgctggcaaatggaagacaatgaagaccaggatgactcttccaaatctcgcttttctgcaaggctcaacccagccccaagaaaaagataaaggagcgcaaagattttccaacaagtcccaaatgcccatcaatgaggaaggcaagtcgctcaccccgaagttcagcccccagccttgtcctcctgcgctcctgctggggatgagggagaggccacggggagaaaatgacggctggaccggtcctccccgtggaagcctttccttccgtggtgggctgaacggtgtcctcctcccgcgacccaagacacagtgtcagcaggacatgggcctctgtctccgatctcggaaacacatcttctggcccgggtttaatctcagaagggcctgtcctcatgtgacttattgcaactaggatctttgcagatgtaattgagttagggatcctgagatgagcttgaggcaggatcggtaggatgaggaggccacactgacgtccttgttccctgtgtgaagcccccgggccccttttgcagcaggcttcgcaaggtaagcagccccacaggacaccagccgacagccggatgcttacaagttcctgatgcccggtacaggcccgggaaagacaatgaagataccttattcctgatgtagcttccccaatctccagccagtcagcacccaaagcccaccaagctcttagccacacattcctgcctcggaggggccaggggcttctccaggacactgtacacacagttacactccaagttcagctcattttaatagtaagagacacacccccaggtgaggattctatatgtaatgatacatgcagtgtgtgttggagcatgtaggtactgagcatgtgtgccaaccacaggcctgtctgcctttacacgcccgacctcgccgtatttcatgaacaggcacgcacagccaaccgcgggcctgtctgcctttacacgcccgacctcgccgtatttcatcaacaggcacgcacagccaaccgcgggcctgtctgcctttacacgcccgatctcgccgtatttcatgaacaggcacgcacagccaaccgcgggcctgtctgcctttacacgcctgacctcgccgtatttcatgaacaggcatgcacagccaaccgcgggcctgtctgcctttacacgcctgacctcaccatatttcatgaatgtgcatgcacagctcccgagaaaggactcccctcgagctaaggggctgcttctccctccgagcagcgcctttgctttgtgacaaacttctttgcctacttgagctttggacttgctctcaaattcttttgtgctgcaaagtcaagaacctgacccagccacccactgataaagagatcatcctggatttagggcaggtcctaaatccaacgacggtgtccttaaagagagggcagaggaaatgcaacacggaggcccaggcaggaggccatgtggaggtggaggccgagactcgaatggcacggccacgagcccagggaagcctggagccccagaagctgggagaggcaggagggatcctccctgaagcctctggaggggcacagctctggccactctgtgatcttggggtctgccctccagaacgggggacagtgcattcacattgttggaagccacctgcttgtggctccttgttacagtgtccacaggagatgttttgtcttctgctctcggacttggggcctggacctcccctcctgcaaggtggctctgccagcacagcgttggctgctctcggcattgctgcgtgggccaccaccgagtcgggcaatggggatatgaggggggtcctgagcctctgtcattatttcctgctgtccctaaacaggctcagggtctcccttggctgggggcagagactcaggtgagcatcctggcgtctctgagaataaaacgtcacagacgcagcctccactcagcgagcgaaaggggcagcccgaggtgtgatccgcgtctggatgtgcggttgagctctctccccgaggagcagtgaggaggtggcatgtgggcgcagagagggatggaagtgggaaaagccggcttgtctcacaaaaaagaagacacctgagcccagagcttgagcagccgagaggagggctggggaatgagggcagggaaggaggcaggcaggggaaccagggcggggaaggaggcaggcagggccacatggcgccagcttgtggcaggggtggatggggtgggctccaaagcaggggccactggagcaggccacactgggaggcatgtgaccaaactcccagccactcgctccagcacacaggctggcccatggcaaaaacagcagacaggaggatgggaggtgagcagccgggggtccttggtgaggctaagacgcattctcccgtgcacacggagaacccacaccgtcgcccagcaccccagagggcttcacggtagaacctgagcagctgattctgaaattcatgtggaaatgcaaaggaccttggagagccaaagcaatcttgaaaaagaaccaagcgggaggactcacaccacctcaagttaagactgattttagtaccacagccattggcagggcaacactggtgtgaagctagacaaagagaaagatgcattgaaatagataaaggagtaaagtgaagaaataatactgcttcggaaaatggggaaatacacaagcacacacactcacacacacatgcactcacacacacgcacacacacgcactcacacgcactcacacacgcactcacacatgcagtcacacacatgcatacaacccacatgcacacacacacgcatacaacccacatgcactcacacgcacacacgcacacaaatccacatgcactcacacacatgcacacacacacgcactcacatacagtcacacacatgcacacaaacccacatgaactcacacacatgcacacacacaggcagatacacacgaacacacatgaacacacatgcacacaaacccacatgtggtcacacgcactcacgcagtcacatgcacacaaacccacacgcgcactcacacacacaaacccacacacacactcacgctcacacacacgcaatctcacacaagcacactctcaaacccatacatgtactcacacacatgcactcacacccatacacacattcacacacactcatacccacacatacactcacacatggacacccacccctacacacgcacgcacacactgaaacacacacgtatgctctcacacacacaccttggcaagcaacaaacacttcttattctggataaatgaattttgatctgtaccttccaccacatacaaaaattaacccagaacggatcattgacctaaatgtaaaccctaaaaccatcaagtccctggaagggaatagaggagaaagtctttgtgaccttggcttaagcaaagatttcttcactatggcaacaaaagcatgatccaaaacaaaacaaaatggataaattggactttatcaaaataaaaaaccatctgttctttgaaagacactcaggtgtagaaagccaagccacagccgactggagaaaatactttcaaagcacgcatctgataaaggacttgtatccagaagtaagacaaaagtaagaaaacaaaatgtccaatgaaaactggggaaaagaccagaacagacacgtcaccaccgaagacgcccaagcagccatcaagcacgtgcgcaggtgcccccctcggcggccatcagggagctgccactcggagccacacgggggccgctgtctggctaccggaaaggctgacgtgcagccgacgtacaaaagcggcgccggtgagggtcgcggaggggccggaacgcccacgtgtggcgggtggggacgggaggtggcgcagctgcttggaaaacaatctggccatttgttgaaacataaaacgtgtggatatctgagcctggagttcaagccagggctagagctagacatccaggactgtttgcctccattagacaggactgaaagacacagagggaggaggccaaggcctgagccctggaaccccaacctcggagctccgcaaaggcacagagggtgggctgtgcagccagggaggacccagggcggcctcagcgctgaggcagggggaggcgtcgggaggcagcgtcacctgcccgactgcggccaaggaagatgctggccgagaatttgctctgggcttggtgatgggaggactcgtcgagtgtgatttccacgcgtggcgggtcccatgccccccgcgggagaagagcaagcagagccagtggctgcgagcttttccgaggagcgggaccgccaggcggagcagaggaaggggcaggaggtcagcagcgtcctccgggcgggagccacggagtcccatttgcgtctggtgctgctggaaaaagcaagagaaggtggaggggcgtcagggaggagcccgtgccggtcccgagcccagggcggggtggccttttcctggggcaggtgctgctccgagcaggagggtggggcataggaagctgggcccatggtcagacatggtttcagctcaaataccagaagtgaccgtgaagaaagcaggaatttggctccatggattcggggccgagggcggaatcgtgaaatagacgccgctgggaacgcgtacctggggcaggtctcagacgcgtggggccggatcccggtggggtggcacgtggcgcctgctgggaccctgtcctggccgctcactttcccgtgtctaaccagctatgcaggcctggcctttgcctgcagcacacacaggcgagggagatgggcgcacgggatcagccagtttcccagataacttaggcccagcctgttctacaaacagctttgaggcctgaacagcacagacggaccctctcactgagggcacccccaggtgacttcggtctccagctctgtctcaggagccacgctctggaagaaactcttcaaagaaaactgctcctgagactgctcttgtttagttattccaacaagaacaagtcccatttagggccgagaaatgaaacagggtcacacctattataggatatagtgctgaacagacatcttttgtaaaacagtccattgactgtggccaagacagttgtaaactatggaatcaataaccactgagcttggcaacagtgagcacctctgatcctgggtgtgagaaacagaagttgtcacagaggccccgtgtctccctgaaatagccccgtgtctccctgaaatacgatcaccaggaacctcctccagaaggcaaaggccggcacagaatcctgcaggcttcacagagccctgcccaggggcaaaccagagagctggggcctggagtacccagcaggtgatgccacctctgtgccctgccaggtgccacctggagataaaaccccagggacaggagcccctgagaacagctggcttcacgcgttagctcttgcgtacataatggttctgagtctacgactgtaatcaataggaactcaatttgacttcaattgacttcaattctttctttaagaagaaatggattggatgtgtctgaggtcccaggtggagctgtcggccgtcatctcccggccagagcccgaccacacagccacagccatggccacagccacagccacggacacggccacggccacagccacagccacgacaccctgcaagggatgccaggaaatgtggtcttcactctggctggagcccagatacatttcagaattctatcagggaggaagagcgggagaaaagataagaggcagatgacggtcagtcattgccacacacagggaggaaggggagtgggagaggagacaggaggcagagattcagagagagcaaggaggagatggagcagagagacagcgagggggagaaaggagggaaggaggagacaggggcagagagaacgagacaacagcagcacagtccttaaaaatcaagcagaggggagagcaggtgcctcagctgccgccgtccgctgcttctccatgacagacgctgcgcccgtcactctgtgccagtcccccatgcgcccttcagtgccgtgtgtgttactgcggcagcagtggccatgtggggccacacgttctcagcagggcggtcacacgtgaacagcctgtgtgtgtctctgagccttggggacacgtttgccagccgacgaaactccagtcacccgtcactgccagggctcgagggtggggggaggaggagacaggagagaggagaacgctgccacgccccgcccggctcccacccgtcactctgcctccgccgctcccacccgcacacctgtacatctgccttcttgtgtgtttcttccaggtttctttatcccattttgaaccaattttatcacaccataaaattaagagattgtcctctttaaaacaatgaagccaggacagatccaccaagcctccctccgacgcccaccctcaggccccgcccctgtcccccgaggtgacgccgacgtgggtgtgacaagtgtccctccaggtctgcccacaaaacactggcctggcgctgtgccctgctttttagacacaaacggcgttggggcagctgtggcctcgtgccttgccgtgatgctccggcatggggtctgtaaatggaccctgccgaaggctgtttcaggttcaggcttggccgaggtcccaagtcaacagggccagcgacggccagggccccaaggcgagcagagccccgcacagaacgtgcagggaggctcccacgcgtgggaggccgtggctgccaggagggcccgtcccccgtgcgcccttcagtgctgtgtgtgttactgcggcagcagccatgtggggccacacgtgttctcagcagggcggccacacgtgaactgtgtgtgtctctgacccttggggacacgtttgccaactgaccaaactccagtcaccagccactgccagggccagaggctgcgctcgagggcggggggaggaggagacaggagagaggagaatgccgtcacgccccgcccggctcccccaactcagagcagccccagagcggtcgggggacgcaccgtggggacagatgcacggcggggacccctctgtgggccacgcctgctcatcacgggacccaggcttctgttacgagcgagcagaaccctgtgggcctggcccaggtctcacaacgacccagggaagcaccccctcaacgggacagagtgggcaatggtgcggggcgggacagggtcagggcaggtgctccttggcattctgacggtggctccacacaggccctccacgatgcccctgcagcaaacttgtgcagaagaaaatatcacagcgccaccaccctactgccgggcgcttaaattagttcccggcttcccgtgacacccagcagctgtggaagtgcctgggcaggttgcttgcacattctttctggacttttctgtgttttccgcaggagaatgctcttacttcatgccattaatgtgcacctaacacctgacactcatcacaaacctttgtagacaaactgctgtttaaattggaaataatggaacacatacacctcatttttcacccagcactagttagcataaaataatttcttttacccataatacagtacccttctcaattaacaaactgtctttaatttttaaagggatatttatcaaacatacatcaaatatgacgatgaatgaagcaatacaaagcctgtgcccaacgctcagtctaggaaagtgggtgatcaccccggcgtccaccctccctccacttcgcaggctgccgtctctggacctcgtgtgccttccccgtggctctgcgccacgccttcccatccccagccacacccggctcacctttgagctcgacgccatggccactgtctcccgcacacgggccttagggccccactcctcctcctgacattgagttcctgagattccacctgagtggctgtgagcactgtggtcattctcgctgccaggctgtgtctgttctatgaaatcacagttccactctgctggtgggggcagcagtggcttccggactctccttctttctttcttctttatttttgagacagagtcctactctgttgcccaggccggagtgcagtggcacaatctcggctcactgcaaccgccacctcccgggttcaagcaattctcctgcctcaccctcccgagtagctgagattacaggtgggtgccaccatgcccggctaatttttgtattttcagtagagacggggtttcaccatgttggccaggctggtctcgtgtgatgcgcccgcctcggcctggggttcctgttcttgctcagggccgctgctgctggctgcctcctggtttccagctgtgcccgaatcagctcgccccacttcaatggtggcaaggtgcccttcctgggggcgggcagcccaggacccacagccgggaccctgtaggctccagcagctctgtgtgagcagccctggcccctggccctgtgctggaggcagcgtcctccccactccgatgtcacagaggaaacaaatgcaaaccgttcagcagtggcccccgaataactcagcctgagtggaacccgagggttctttgcaggacttaagtggcgccgtttctgtcagacagaaaataaactaagtttatggtatttggaaagcatcagagttcagcaagatcacggcacccaggaccacttgagagctgcagtgattgagggctgggcagaggcgacgcagctggggacaggccaggaatgtcggccccatccagggagcacagggcgcccctcccagggccttggaggaaattcaaccctgtcaagcttggaggccttcggcgcatttagccgttgaaggaagtacccaccgtggtgtgctccaaccagcattttcacattcacagtgaggccagctcgctcctgctcccaccagcccatcgcaggtcagagaaaagccagacgccctgctccacatctctctcatacttctccgctcttcacaacaggcagcctggccagccccttctcacctccctgggcactgcggctgcacccccaggcctggcaaggtcacggtgacctccacaccagcccatgcaattccaggcttcccattgcccctgagaaggtcaaagccccgggttgctcagccaggccgctccctccaccatcccctcttggttccctttggctcactcacctgcgcccggcccctggctctgtggcctgcgctccaggcctgctcctgccccagggcctttgcgctccccacccccacctggatggccacacacgccctcacccttcaagaggctcaccccgtgctcaacgtaaaatcccaccagagccccggcctccagcctgctgctctgcctctcccacccccacccccggcttgctctttgcacccctgccctgctctcctgctggctggggctcctggggcaggggttctgggtgtgggtttgctgtttcaccgcctcatctcgggacccagaactgtagacgcacacagggctccatgtgtggcctttatggagcttgaattcattgcactcagcagaggggaaggcaggtgatgagcgggcgtcgtccaaagcctcagagctgtgggtgagtctccaaatggttttgtttgaacgtaacattaaaagtctaagttgtggcttgggctgaattagaagctacagcaccacacacacatgcacacataagcagacaccacacacacgcacacatgaacatatgccacacacaagaacataccccacacacacgcacacatgcacagacactacacatctatgaacataccacgtgcacacaggatacaccacacacacgcacacacgtgcacactccccccgtgggctcctggcagcaggggctgttcccatcactctggtgcttgcccctgctggggaaccgtccagttgtcaccaactcacttctaagccatgtatcagggcttcccagcctcagctccagactgcacgctcagcttctccatgtccagcccggcatgcagggcatgacgtgtgacagggctcagcccctccatgtcccttctttcccccgtgtctaggctgtccttgccaggcagtggactttcgctcttgccctgctcagccgcttccctcctccttcccataaaacatggggctcagcccggcaggaactccctaagtagctgggtggagttccagccctggatgaaggggagggcacaggaccaggctgagccaatcagcatggcaataggctcagggagagacacacggcccaatcagagccaggagaggttggctgggctccgggagacaggacgtgaggctggagtggctgcagcctcttgcagacagtggaggctcaggctaagccagcaagaccaagaggagcacggagagctggcaagacgctggcccgatgatatcgcctgagccgtgaatcctcctggccaacgccagggcttcctcaggctttgtcattgcagggacacttccctccctccctccttctctgtctctctccccactgcctctctttctagcttaagccaatttgagatggattttctgtcacttgctgttgaaggagtcctggtccagcccaggtggatttcgtgcaaatgaaacccacataatgcaagtctgtgtggaagtgatcgtctgcgatcggcgcgtgcccttcgccttatgaacaggagccatgggtgacacgagcgcctcggctgggccgccggggtccgtctgaggtccatctgtctccaggtgtgtgctgggtctgtgggtgagatgctgcgtgtgcatgtgtgtgtgcccaggtgtgtgtgtgggagctggatcccaggccacccgcacagtgggagaagggggagctggatcccaggcctgagaaggctctttctgcttagagagtccagggctgcctggcatcgagccggctctgccccgcaggtcccagtgaatccacattgcagcaggaagccacagggcaggaacctcagctttccggttggcttccatgaaccaaggacaagcttgcttaaagttgtgcccggagaggccgggagagctgcttcaaaggcaaagaccacccagtgggagtgcattcccctggtgctcacccaagggtcccactccccctgagacatttccttcccagggcacagaccccaggcctggacagagccgggcacgtgtgaaacgggaagatgtcagctggggaaccggccgcagctcccaaccttgatgaggaaagaaacctggtagctgttcctgcagaaaagccacatggctcgccgcctatctccacgatggtacctggcttctcccatcctcaccgtccacgtctactcccttcccatcccagacccgagacgcagaaggctttagacagagcagcttcatcaggaatctggactgggctgaggtacctgctcccagctcctcaaagtgccatccggtaaatctgcatctattagagctgacagccaggctgctcaggcttaaacaattaatatgcatgaggagtccgcaaacacagagcaggggcatgttactgtgctgggatgtaggacggcttctcggataaggtcattcatttttatgattctgcttaatttggatttgccagtcttcctttcattatcccatgggccagtcttaataatcaagactatgttatgtgctttgtggcataattaaagccactgcctaattagacaagcatctaccgtctgacaaagagaaatcagtaatgcagctaatggagaaagtggtgaggagttgggtttgaaagtggatggaatcacctgttggtgccagaacacacacacacatgcacacatgtccacacatgcacacacatctgtggacacacacacacatgtacatacatctcacacacacagatacatgcacacatgtacacacgcagatacatgcgcatgtacaggcatgcacacatacacacacacacacactctcctacattctatgtgtgtttccgatgaccagccctgtcaaaccaaaccaatcagcagtgcagtttctgccgggatagttggcctctgaggggttaaagccatgcagggaatccaagtctgagtttcaagtgggccgggctgagcttgcttttgtttacttctttaatcatccatggacgcttgctggggcctgcaatggccaggcacatccacccacgtgggacaagatgcagcttccgtggctgcttgcaggggatggaagactcccacagacgcctgctaacatcacatgcccaagtgtcaccgcgatgccacgtccagtctgagccattcctcgcccatgtccctgtccttgttgcatagccggcctccagcgtgtggcttcgtgcagcgaccagaccgtcgtgtgactttctgccacggttgctggggttggcactggggcagacctgctggggggttctgggttgcagctggagcgctgggactggcaggacgcctctcttcgtgctgccccagggcccatccacgtcgactcccggcgtgaagcgtgtgggctgcctcacagcctggcagctccaggactgctgggggctccccccgcggccccggctctgctggcagcactgggccagaagcaactcaccttcacacagccgccctgaaggcacgtaggttccggaagggaaccttgggaaatgggattcgtgccatactcatgggagtcccaagctccctcgcccatttcactccatgaggataggaggggacagctgctgacgacctggcagagaccctgcgccaggccccaccccaccggcaccctgatcttgcacttccggcctcgagaatggtgagaaactcctcgtgttgtttataagccacccggtcagtggccctctgaccagggccagcagctctgaggccctccccccgccccggccccctccccctcactcccacacccaccctctctggtttttctaaactcctcctccccattctaacccctctctctggcccctgcgggctctggggaagccccggggacagtaggcaggggccaggctgctgggctccccgaggcccccgggggctgggagtgggttaaagccgtccagggcttcgctagggaggggctccagcaagaccctgtttaaacctccttcccaccacagcgtgggcgccacgtcgcactctctgggtatgtctcaaggtgtggataatgcagacttctgagtttaaaaaaataccaaaaataaaataatcaggcatcaaacatacaagttatttgaggacttaaaaacagcacagcaggctggaacaggaggcccctaacccgatggtgtcatctctacatccacagcccccgcccgggagggtctgagccaggcagcctccccgggagccggtgctgacacggccagagaaaccattccagacccggaccccactgtccccaacacctgcgggccagtgactcagggcggtggagagagccaagaggaagtggaggctgagtggccctccccggggctggggcccgccgtctggttgtgtctccagccgctggtttaggggaatcgggagggctcacttaagcatcccttccctgcgtgctcttccatcgcgggacagaagacccgactgctgccagcaccaaagggtgttcccacggcacacgccgcttgggctcgggcaggcagggacccctcctcgtgcctcgggagcctggagctgtcggccctgcagctgaggaccacaggaggtcagggacatgcaagctcagtgcccgaagtcacttctagagtgcgattcggtgtccctgaaggtcccaactctgccctgacacattacagaaaatgtcgctgccccctggtgtggatgctggcccgcccccggggaggcttctgccccatcacccagcccagcccatcccatcccaacaggactcagcctccagtggctaccatcagaccccacggcatggtgactgtcactgcagagggctagagagggccgcgtgtgggacggcaggggccgacggggggctctgcattccccagtaacccaggtttctgctggggctgctccccagctgctctgctccccagctccctacaacgcggatttattcttatttcccacagggaaggcctaacaaggcttgaccaatcagtgaagggcattccccagactgctggctgtgactgggtcccagataagcacgtgacccactatgggccaatgaaagtcgcctgagacttttgcttgcatggttgctgggacggtccaaagtcctcagtggggacggctggctgcagctgtcagacttggagcgtgaggacagagctgggccggttcctccctgggatctcccctccccgagcacaggctctgctctgcccagccccatgctgtcccctgtgcgaccgctgtgggcttcctgccaggctcctgcaccctccggcttctgttgggttcagttctgggaggcagccccggagtctggagggtggaaggagtgaggggcatcccctgtcccctccccacagtcttggcagtggtttcttctctccagagttactgtccctaccccctgtcctctctctgcagctccagctcttgctgggcgcctgtgattctcacccctgtcccttcaggccgtggggagaagaacatcccagtgcggtcacttcctggatccaattcctggatgcccagtgtccgccgggtctcctggattcaccgtggtcactgcctggatgcccagtgtccactgggtctcctggatccaattcctggatgcccagtgtccgccaggtctcctggattcactgtggtccctgcctggatgcccagtgtcctccaggtctcctggattcacttcctgaatgcccagtgtctgctaggtctcctggatccacttcctggatgcccagtgtctgccaaatctcctgaattcacttcctggatgcccagtgtccaccaggtctcctggattctgcctgtgtccacgtgagggcaccatcaatttcctgcaaggatcctgacagtcaaggtacatctaacctgagagcaggcaggggctggactatcccctagatcaagccatgcctgaagccccacctttcagttgcctgagtcaacagattccctttttgggttgagccatttctaattggattttatgtcttactgactgaactatcaggatggccagcagtaaggggtttcgttttggaggatgagggacacaaatgtctcttctccaaggtgaggagatgcctgaaggacaggagacactcacaggaggccctggagacagatgtgcctcacaggcattcctgaggacctgtggcctggcagcacagagactgggtgaaaacagaaccttgtgatctgcaagttctgccgctgccctgtctgtgtctgtgaagcaaagtgtccagaaggggcccgcgtggaagcttctgagagcggttaggggaacggggccccacgtcctccccggagggctggagacagaggcaggccgtgcccccagcccagagtagggaggaggctggcaggcggcagctgtggaaaggaggcggagcccccagactcctgagccagcagaggaaggagtgggacagagcccaccccagagggagacaagaccccggggaagagacccctcagggtggccccccagcccctcccaggctcagctttcagcctgcacccccgtctggtccctcagaatgactgaggtttccactctttttctgccaaatctctagactccacgtccccgctctgccacctactctctgtgggatctgaataaagagacttaacctttcctgcctcagtttccccatatgtaaaatgggacaataagaggctctgcctctaagccttgctgcagggattaagggagcgatgcgtggtctgcagccagccccctgcagccaggcccctgcagccagccccctgcagccagccgcctgcagccagtggttcttcagtggccccagggaaaggccaggcactgtggagacgcttcccagccacactcgctgagccgcgccgggatagggtctctccacccaagctccttttaggaaagtggttcctgggaagatggataagacccagcgtccaccggggtctgcgttctaagtggtacgcttgtgagggctgttgcacgtgaacaattccctgtgatacattccgcaggcaccggggaagctccaggctgggcgtggagcctcagagactgtgggcagggctcgtgaggggcaggcgaggggccaggaggcctccttcgcattcgagcttctcagccacgtgtgcaggggtgggctgggtgtgggagtgtgtgtgtcactggtgtcaaagcctcctcactttttttgggaaagaaatgggatataaatacatgtgtaaatatctatataaaattcacattctctaattcaggaggcagagagctgtgtgccttcaaaccagagtatctataaactgggtttctatcagtgagggtatagagcaaatgccggctctgtcaaggttcatcccgatgtcgttctctgtgacgtaaaaacaaagctgggactggccacttctgccagactttatcttggcagacaggtttcctacagcagcggccacctacacctggggggaggcagcaggatgctgaaccctcaaaaggagagcaagagcccccactgtgcagcaagcccaggcctgggggtccccgatcccacagaggaggaatcagctccactacagcaagcccaggcctgggggtcccacatcccacagaggaggaatcagctccactacagcaaggccaggcctgggggtccccgatcccacagaggaggaatcagctccactacagcaagcccaggcctggggtcccacatcccacagaggaggaatcagctccactgcagcaaggccaggcctgggggtccccgatcccacagaggaggaatcagctccactgcagcaagcccaggcctgggggtccctgatcccacagaggaggaatcagctccactacagcaaggccaggcctgggggtccccgatcccacagaggaggaatcagctccactacagcaagcccaggcctgggggtccctgatcccacagaagaggaatcagctccactgcagcaaggccaggcctggggtcccacatcccacagagggggaatcagctccactacagcaaggccaggcctggggtcccacatcccacagagggggaatccaatgggacccctgcagctctaagaacagaaaacccaattcagatgtgcttaaagaaaaaactaaaaatacgtgtgtgcgcgtgtgtgcgtgtgtgtgcgtgtgtgcgtgcatgcgtgtgtgtgcgtgtgcatgtgtgtgtgcacgcatgtggtaatttattgcaaagtcaagtgggtctgttttgggaacagctggatctaggtgttcagacactggccccttcttgggtttcgtgagggaccctggaagctccaagctctcccctcttgatgataaggttgctgcagctcccccagctcccagccttggtttcatcttgtgggaaaaggctgcctgtttttttctcgatggcccgctggtaattccagaattcactctgactggactggcttaaaccacctgaccagccctgagccaacccctaggtctggggtgaccttcacgctctgactggtttagacctgggcggcgggatctgcagctgggctgaaatggatcagagcggggggtgtggacttccatctggagccgggacaggacctcaggaggcaaatgacgaccgtctgtgacacgcaggcccacgtctgtgctagaaaagccaccccttgatatggggcgaggatgggacccgagagaccctcgccccaccctgcactggctcagcagccgggtccagactcccaggcctctggaaaacgaacctcggggggacgcagagggtcacacagggcttcacccccagctcgggttcagtcctgactcagagacgacccggcccccacgactggaccccacaacgcacagggcccccgccggccaacaagaccaaggtcacgcacagcggtgctgggatcctccagaggactccacaggggaccgagggcctgcagggattcgaaaaccagtgccggacgcagccttcctcccttacagcaagagctaggagataaaacaggcaggccgggagagcagggcccgggtcgcgccttcctcacggctggaagcctcccaggtgacgggaggaatgatggggacggggcggggtacttggagaccttcctctgtcagatggctctgatgtttccactgttgctgtgagcaggaaagggttaacttggcagctggctcctccacaccctgagcgcccacatccggcccctccttgccccggaacctcctgccggagaggacagccctgctcacctggccttggcagccccagctggtctgtgcaatggtgggattcacggtgggcacttggcctcacggcatcagcctgacctctggagggtggagaccaaggtcagccatgtccacgagaccagcccagtgaggaccatggtcaccgaggctcgggggctcctggctggcctcgcttggcacgtgttgtcacacatgggtgccggagaatcaagtccatgggacccccccccaggaggggacacctgggagctcgcacctggcctctcctgggccctgcctgggcatctcttccctctgctgactttaacccatgtcctctgctgtgagaacccacagcagggaaaagcagcctgtctgggctctgtctgtccttctagcaagttgtggaccgtcaaggtggtctcgggggtcttcctgccacacagctgcctggaggctcacagccaagaacggtgctcactccagcagtggggctagccctgagagcaaacagatttcacccccaaattcaggacacacaggagcgttcaaaaaccacacacacacgtgcacacatgcacacacacgcatgtacacacgcacacatatgcacacacgcacatgcacgcacacccacgcacatgcacgcacacgcacgtatacacacacacgcacacccacgcatgtgtgtgcacacgtgcacacacagactcctgtgcacacatgcacacatgcgcacacacccgcacacatgcaggtgcacacgcacacacccacacccacccgcacacaacgcgcgcgcacgcacacacacacacaccgtgcaccctcagtgcacaggctggctaacacacacgagccgctttccaaaccgaagtcattccagccccatgcctgtagctggcgccacatgaaaacaccactgtgttcttatttatggagcatgtttctttaaactggcctattttaaaactaaatgcattttttatttgaaagggaatcttcatttcaccgctgcaaatggaaagctggcatcacttgtgttaaatcatggtaaccatgaaaataagtagaatgaaaataaaataatgttgtcacactctggatgtggctgaggtgtccaagcctccatgcccaggcctcagccctgtttgtctaaaggactcggggaaaccccctccaggaggaatcagagcctcgggagctgggcacgcctcactcgcactgccgtgctgtctaaggaagcttcatcacacctagaatcagtccccagcacgcatttgtgggaagggtgtgaagtgggccccacctggctagaacagggagctccgggttcctgcaccaacctccacgcagcccggggcgctccctgcacccctggaccctgcgggcctgtccagcatctcgcctccctctgtccacacatggggaaccccagagcaggtgagtgaacgccctgggaaccactgcctgagtcacaaggaatggaatggggctgagacacgcctttcctcctcccctctcttccctgccagcctcctgatccccatctcaaatgagctcctggcccaagaatcccggtgtcagggttccctggcgggtggggcaggctgaccacaccaggagctgcagagggggctgccctcctgcctgccctccctcaggcagctccaggaggaggcaagtgtggctgaggccacctgccaccaccccacggtgaaacgcggccccactgggcagccctgagcgcccggcttctgcaggacaatgccaccaggggccctcccagggagcatcctgtcgcgggctgggctctgcggacagagacgcaggaggggctggccaagcctgccagtcgctcccaggcccagaggccaagctcagccaaactttatccgagcaacaatgccaattaatctggcgcttgtcgcggctactccctcagggcaggtgtgagggtcagcgaccaagctccatcctgagtggcactgaggcaaagccgtggcggccagggcccggctcctgattcacccgctcttgcagcctgggggcgacaggatgggaggtgcgcaggccacggatggaacgggaatgcccttcgcttcagacacaagcgacacccagctcagcagtgactgaggccacagcaggtgggaccagggctggcagggcctgacacagggcgcctctgctgcgtgagccatggtgcctcagcccagcttccgtgatccccagatgcagctatggcaggagtgccccaagcctggggctaggccctgggaaggatgcccgcagccaaaagtaggggagggggagagacacagagagatagagaaagacagagagagatacagagagattgagagaaggagagagggagagacagagagagacaggagagacagaggaggagagacagggaagacagaggaggcaggagggccccacaggtgggggctcctgactgctccactttcccacagcagacctttgcgcgtttctcccaggagcccgcagctcgtgggggcagtccccggccagcacgggggagcgctcactttcccggccagcgtggggggcggtcacttccccggcgggcgtggggggcggtcacttccctggcgggcgtgggggccgctcacttccccggccggcgtggggggcagtcacttccctggccagtgtggggggcggtcacttcctcggcgggcgtcgggggatggggggcagtcactcactcactttctgggccggtagtcggggatgctccgatcgagggagatgcggtcgctgagctgagcgttgtagccgtactcctcatacttgccttccgcctcctggccgtcatcacgcagggtggccgccaagccaccctggcccaggcctcctggcccctccaccaggccgatgggcttggcaaggcctgggggaaaggaagagagggaggtcaggcaggcccaggacacgctgcgtctgcacccaggagacgcccctcccgcccctctccccgacggccgcttcccccggtacaagcccagcaaactccctgcagatggcaggctgccagctcaggacattccagaaagtgcaaggctgtgcgcggagtgagagggcggtgccaggcggaagagggagggatgaatgggtggtacatgaggcgttgaaggcagtggactctgtgtgatgctgcaatggtggatatctgttattattatgtattttttgattcagggtcttgctctgtcacccaggctgcagtgcagtggcatgatctcagctcactgcagcctggacctcccaggctcaagcaatcctcccacctcagcctcctgagtaaatgggtgggcctccacaactggcaaatttttgtatttttagtggagacagggtttcaccgtgttggtcaggctggtcttgaactcctgacctcaagcgatccacctacctaggcctcccaaagtgctgggattacaggcgtgagtcactgcactggccaatacttgttcttacgcaattgtccaaacgcacagcaggtgtgacactgagtgagcgcccccccccccccccgtgagccacagccctcagtgagtcacctgcatcgggcagcatcggctcatcgacggtgacacagtcacactcacgcacgccagccccccgtgagccacggccctcagtgagtttcctgcatcgggcagcattggctcatcgacagtgacacagtcacacacgttcacgcccaggcgctgtgcctgcggggcagaggatgcgggaactccgctcagtctctatcaacccgaaactgctctgatggtcaggcctactaatgttaaaaatattaacccgaaaattgcaacggctctaagattaggtattttaaacgccatgccgccgccaccatccccaccagcccttgacaccatccgcctgtgtaacttgagctgaacacacatccacatgcgtgctgctactctggggtaggaagaaccgagccgtcgacacaggcagcagccgagacgtggctcacacacgtgacgccaagccaaagatcaacacaggagacctcatcccgtgtggccgccggcgtgaggttcaagaacagacggaatcacaacccaccccatggccatcggggcaggacggggaccccggggtggggcagtgtcgactggaaaggagccggtggaacttctgggctgacagggaggctccgcagcttggtcagggtgtgtggaatgggtgcccaagggggccgggccagggaaagttctaggtgctcagttgtgctgggcaagcagacgcggcttggagatgctgttcccagggggacgggagtgagaggggtgtctccccacaaagatggcaccattggctgtctctgagctgggagtctctggggcatcttggatttgggggcgggtgcctgggcaatagttttaagccagaaagaggcggcatggacccctgaggctgggctgccttttgtcagcttgcacagagaggtctctggtcctcggaggaaggccagtggaaacacaaacttgtgaaatacccgatgctaatatcccacaactgcccgcctgggaggggaccttctctcgcggcgccagctcctggagcctggtgggatctctgtaggattcctgctatggggagggagggaccgatgccctgggaagattccagtctgtgaccctccgccccccacagggcagtgagtggctttctcccctcagcagagccgaggctttgagcctcccggaacctctggactttctggaatattccattttaaatgagtaaacaaagtgtccgtatttatgtaggactgaaggatacagattggacgtagaattgaaaaatgacacaaatcacttccccttcttattttaatcctgtgagataaatacgtaatcatgctattttaaaatatcgatactgcacttgcatttttcactttggaaagtctggaattggatgtctcccagaggcaggcacagcagcttctaactcgagagagagagacacctcatcatccgtggggctcaggcctcaggtggggattggccgcctggccagagggtagctgagcgtggttccagatggctgcctgatgcccagcgttgggggcaggagggtggctgagcgtggttccggacggctgcccgatgcccggcattggacccggcaggagggtggctgagcgtcgttctggacggctgcccgatgcccagcattgggggcaggagggtggctgagcgtggttctggacggctgcccgatgcccagcgttggaaccggcaggagggtggctgagcgtggtttcggacggctgcccgatgcccggcgttggacccggcaggagggtggctgagcgtggtttcggacggctgcctgatgcccagcgttggacccggcaggagggtggctgagcatggttccagatggctgcccaatgcccggcgttctgaggtcagcaggaccctctttcttattcagactggcattttgtttctgcctgtctctggaaactgattttttttgttgttgggatcctagatttggtcagggcatatcttgccgtgaatcacagtcatgcgtggcaatccacactcatgccaacgttcagctccaggaagtttgctctgttaatgatgtgactgtattcccatctgccatccctgttttctcttctgtaacccctgttaagtgaacgtttcccctcccggtttatctcctgcctcccaacgcttcattctccgttttcattctcttggttttcatctcatcggcttgatcttttgtcgtgccatgttgccaactagcctgtccattgaattggttttgttgtcatatatttaatcccaaaagaggcttcttgctctccagtcgcccctgccttgcatgaatggcaaactggttttactttatgtggttggcagtagccccaaagctgtccacaccctaatccctggaaccggtgagtgtcacgttacacagctaaggggacttggcagacgccccctgctttgcctgaatctgcttcattggccagaaggagtggaggagctgggccttcactgtggtcacccgtcacttgcatgggggttaggggacaccccagccacgctgctgctcacagcttccttgcggaggaagtgagggttgccaggcctctgaatgagtgtgttttgaagagagacgctgccattcccatcctccctccacccggggctccatgcctcccctcactgctgcgtctgtgcttaagagaaccaagcagcccctggtccagacgctgctgcccactgagctgcctgacttctcctggctgagggtcctccttggtcacaggcgggtcaccactgagtccccgtcccaggactgtgcagatggtggagatggagctcaggggtcctgagcccagcactgggcgtgcactgggggtgaaggaacttttgctgcctcagatccgatcttcttccttggctggtggagtcagtgctgtcaccgtcccatagctgctgagagaagctgctcgggggacaccagtgccagcagcacccacgttcctggccatggtgcttcactgctctctgcagtggcttcatcaggggtgccaatttcccacctccctgactcagggcttggtctctgagctgcctgtggaaagagggcccaagcgatgatgtccctgttcccagcctggaccttgcagagccaggtgcctgccccgtctgccctcaccacacacagagcccccatcatgactgcccagcctgggccctaggacaggcctcgccatgcagagcggaccggccaagccacggaccctcagtgagaggcggccccacccctgcggcaccatgggagtaagcgaggccgtcccaacgcgctgtgtcttggggtgatgggcacggagccattgccacccaacaggctgttctctgtgctgtcctctgcccagtccaggaatagacagcacaggaggaggaagcagaggcagaaacagccacaagctcatgtccacagcacccacatccagagcacccacgtccacaccacccacatccacagcgcccacatccacagcacccacaaccacagcacccacaaccacagtgcccacgtccacaccacccacatccacagcgcccacgtccacagcgcccacgtcctcagcgcccacaaccacagcacccacgtccacatcacccacgtccatagcacccacatccacagcacccacatccacagcacccacaaccacagcacccacgtccacagcacccacgtccacagcacccacgtccacagcacccacgtccacagcgcacacgtccacagcacccacaaccacagcgcccacgtccacatcacccacatccacagcacccacgtccacagcacccacatccagagcacccacgtccacaccacccacatccacagcgcccacatccacagcacccacaaccacagcacccacaaccacagtgcccacgtccacaccacccacatccacagcgcccacgtccacagcgcccacatcctcagcacccacaaccacagcacccacgtccacatcacccacgtccatagcacccacatccacagcacccacatccacagcacccacaaccacagcacccacgtccacagcacccacaaccacagcacccacaaccacagtgcccacgtccacaccacccacatccacagcgcccacgtccacagcgcccacgtcctcagcgcccacaaccacagcacccacgtccacatcacccacgtccatagcacccacatccacagcacccacatccacagcacccacaaccacagcacccacgtccacagcacccacgtccacagcacccacgtccacagcacccacgtccacagcgcacacgtccacagcacccacaaccacagcgcccacgtccacatcacccacatccacagcacccacgtccacagcacccacaaccacagcgcccacgtccacaccacccacatccacagcacccacgtccacaccaccgacatccacagcacccacaaccacagcgcccacgtccacaccgcccacatccacaccacccacctccacagcacccacgtccacaccacccacatccacagcacccaggtccacaccgcccacatccacggtgcccacatccacagcgcccacatccatggcgcacacatccacagcacccacgtccacacctgtgctggcacccctggagaccagatgcgctcagtcctttcctcccccctgcttccccatcccctcctgtccccacaccctcagttgtccattcagcagccagtgtgagcttgtagagggttccagagccgctcccctgctgggagccatgggccccaatcctgctgcacttgcggttccggctcctcacggcagctgtggcccccccagcccctgcagccctcgtgggtcgcatcctcactcacagtatgccagccacgctcctgcttcctgccccggggccttggctcctgccctcactcggacctcagctctgggttgcaccctggagacctcccaggttctaacctgaagccattcccggtgacggcacctcagtccctgcctcattttcctccctgcctcattttcctcccagaactcagaactcatcaccatctaaaatcatcccctccgctacgctctctgcttcccctcaacgtgcaagagacaggactttgtcctgccttcctgccatctaccccagcgcctcatgtgttcacagcatgtacctggagagccgcctgaggtgggtgaatggatcccttccaagcgggtgccagggcactgcctccccccatcccacaggagaggcgggatctccctccccatccccgcaatgaagagacagagatgccgagccacagacaagcccacccaaggcttcacgggctctgctgggccggacccgagtctctgactccctcgagggccctgctgtaaggtcctggtctccacacaaaacggagcagagccaggcagcaccatcctggtcctggctgggcccaaacccctggccccggcattcaccctacaacactgcgcagaatgtgggaagagccttgtctttgaaggaaagtctcgaggccccactgaagccggacaccaggctccactgcctcctgggccagagctacagcatccagcagggcggggcgtgcgaaggaggcactgcttgctctgagggagtgggtgtgagtccagagaaaagggaagggaaggagggtggggagagggtggagtcggtgagacgggaagtctggaccaccgttgttcggtggaatccatgggacactcatgagagctgtgcggaggacgccgcctcgcatgtgcagggctttcacggaaaatactagaaagagagactttcccaccaggaggagagtctgagatggcacaggcagagggagggtccagaacgcacatccctaggaattccgcacacttgaaggggtatttggggtttcagctctgttcaccaggtgtgggagtggcggggccagggctgccataatcagggggcattgagcctcaccccacagtggggccgagccggccaggcctcaacctttagttgctgacttgtggggacgcaaggggactgagtgggggggctcaggcagctgggaggctgcagggaaggggcctccaggcagcattcacttgacgcttcccagggaaatacagtcagttcttgtcatttgcagtggttttggctctagagacaccgtggatgctgaatggtggctgctgagcacttgctccagggggaactctgggctccggggagcctctggccacaggctttccccagcccctcaataggtaacttggttttccatgtgtttctgcataaagatgccttatttaatacctattgacgattcttagagccaacagctccatgacccatgctggagccaagcttctccacacacgcatttcctgcgaggcgtatctcagacacttgtgccctgggtaccgacagcacctcagcctgtggttggtgtgttctaaacattgaaatcaccaaagcacaaaaagcacaaaaatgtagacaacgtgccacttaagcagtagtagggaccctgtgtacagtcggagctggatggagaaggcaggggaccccctgcacattcagagccagaacgagaagctgggggaccctgtatacagccagggccagaacgagaagccaggtgagcccgtaaacagtcaggggcagaacgagaagccggggggtcccgtatacagtcagggccagaacgagaagccgggggatcccgtgtagagtcagggccagaacgagaagccgggggatcccgtatacagtcggggccagaaggagaagccaggggaccccatctacagtcggagctggaacgagaagtggagcctggccctgtttgaccaaagatcttgcccctccgagcctatctgtgaatggccgtggaagaccacgagcatttggggattacagatgaattttagggagtaggaacatttgcaaacacagaatctgtgaatgatgtggctgacagtactttgatatcctggtgaccactatggacacattggtggggctggtgggactggggggcacaggccctcctggggcaccaggtcttcaccattgacctccccccagagctgtccctggagcaggtgggtccaatgaacgaatgactctgaccagagtcagcagagagatgggagtcgcctcccccacagcccccagcctgtgcccctgaggcccagtgaggcccctgatggtgtgaggctcctccgtgaacagcagcctgagaacagtgcttctcaaacccagctgtatcacccgtggtccttgttaaaacacagcccaccagggccctccagaagtgtctgatccacaggtgcacgtcaggcaggagactcaggagctctggtgacctccgggtgatgctgaggctgccaggctggggacccactcagactctggccttggagccaggtctcagaggcttcaggcgtcctgctcagggtgccagcggtcatgtagcgccaaggtgctggcagaggctggggtcaggactaagagggcagggcaggagcaaggagaggctggggtcaggacttccagccaggaaggcagggcaggagcaggtgcagacccggggcagcctctgggagggcgggtggggtcagagccgcttggctttcccagtcacgttccctggagcgggagggatctgttaatagctctgaaaagtgaaaatcccacggatctgattttgcctgtgcggaaggttgccgtgggcgcctcgcagcaggatttctggagctctcatcttccctgtctcttatctccagcgtggcctcatatcttctttcacaaagaattccttccaagaggcaggattgcttgatcccaccaggaagcaaggacaaacgatgaagaaactggtaaaagtgtggagacgcccggcctgcggctgcagggctcaagaccaaatccctctaaacgcactgtgggatggagccaccagtggtccctgtagctgcactgggggtcacaggagcggccggtgctgccacagcccaggggccagagatggggcctccagcctgggaagccagcggggccttcagacgggcacccggagagtttgctctgctcttcccacccccaatgccctggcttccccgacagccccatgccgggcaccatgcaggcagggaaggagaggcccagcgccaggcgctgtgcaggcagggaaggagaggcccagtgccgggcgccgtgcaggccgagagccaaagtctgtgcagactgttgtgggttgaattgtgtcctccagaaaaacaggcagagtcccagccctggggacctgtgaacaggatcttatctggaaacggtcttcgctgacgtcatcaaggtaagaggaggtagtgcgggagtcgggtgggctctgagccaaacatggtatgtccttcttagaagatgagacacagagacacacgcagagaaggggcacacacgtgagggtggaggcagagaccggaatgatgtggcccccagccagggatgcccaggtcaccaggagctggaagaggcaggaaggatcctcccctggagactatggagggagcgtggcccagccagcaccgtgattctggaccgccggcctccaaacagggagagcctccaaaagggagagcctccgaacagcgagagcttccgaacagggacagcctctgaacagggacggcctccggaacagggagagcctccgaacagggagagcctccgaacagggacggcctccgaacagggacggcctccggaacagggagagcctccgaacagggagagcctccgaacagggacggcctccgaacagggacggcctccgaacagggacggcctccggaacagggagagcctccaaacagggacggcctccggaacagggagagcctccggaacagggagagcctccagaacagggagagcctctgaacagggagaggctccggaacagggagagcctccgaacagggagagcctccgaacagggagagcctctgaacagggagagcctctgaacagggacggcctccgaacagggagagcctccggaatagggacggcctccgaacagggagagtgtccgtttctgttggtctaagccacgcagtctgtggtgatctgtcacggcagccccaagagatgaccgcacagcctcatgctcacgccagccgtccagcccactcagaccagcggacacaggtctgtctgggatccaagagcaggagatgcccacgctcaccaccccatccactgatggcccagctgtgggctcttccccggatctcatgggtgtcttcctgggctgcgtgatatcaatcccaagttttcctctttgaaatcccagcttcctcctccagacagaatcaacactgcaagcttgtcatcttatccttgaataagatgtaattttgagaataatgggaaatttgcatctattagctcagcctttgaaaggtctgtcccacaactttcatgaaaaacaaaccaagctcaatatcctgctgttctgaggtcacaggctggtggtgacagctgacctgtcacacaccaactttcagcaccattcctcaaatgtggcaattcacaagaaaagaccttatttctcacactctgggaggctgggaagtccaagatgaagaggcacggatctgacttcggcctctgtgctgtgtcatcccatgtggacggcgagagcacacacgcattgggggctgggcggggggagggtggaactcttccttccatcaggagcccactcccacacaaaccaactcactcccaagatacccaactcactcctgaaataacaaagccactcctcagataaccaacacattcccgaaataaacaacacactcccgagatgaccaagtcactcccaacacaaccagctcactcctgagatacccaaactcactcccatgataactaactcactccgaagatgaccaactcactcccgagataaccaactcactcccaagatgatcaagtcactcccaccacaaccgactcactcccaagatacccaaactcactcccatgataaccaactcactcccacaataaccaactcactctgagatgaccaagccacttccatcataaccaactcactcgagataactaactcactcccaggataatcaagacactgccaagataaccaactcactcccatgataatgaagtcactccagagatgaccaactcactcccaagatgaccaagccactcccgagataaccaactcactcccatgataaccaactcactcctacaataaccaactcactcctgagacaataaagccgctcccgagataaccaactcactctgagatgaccaagtcactcctgagatgactgagtctctcccaagatgaccaagccactcccacaataaccaatcactcccgagataaacaagccactcctgagatagccaactcactcctgagataaccaactcactcccatgataaccagctcacttctgagatgactgagtctcccccaagatgaccaagccattcccaccataaccaactcactcctgagataaccaactcgttcccaagataagcaagccactcccaagataaccaacacactcccatgaaaaccaactccctcctgagacaaccaaaccgatcccacaataaccaactcactctcataataaccaactcactcccaagaaaactaactcacttctgagaaaaccaactcccaagattaccaactcactcccgagataaccaattcactcccatgataaccaactcactcctagacaaccaagccaatcccacaataatcaactcactctcataataaccaactcacatccaagaaaactcactcactcctgagaaaatcaactcccaaaattaccaactcactcctgagataaccaattcactcccatgataaccaactcactcccacaataaccaactaactcctgagataaccaagtcattcccaagatacctagcccactcctgagataactaacccactctcatgataaccaacccattattctgataactaactcgttcccaaggaaacccactcccaagttaactaacccattcccatgatgaccattgcacctcagagacaaccaagtcactcctgagataacccagtcccatgataactaacccattcccaccacacttaacccacccatgagataaacaagccacggctgagataacccactcccatgataactaacctgctcccaccatacctaatccactcctgataaccaagccactcctgagataatccactcctataactaacctgctcccaccatacctaacccacccgagataaccaaaccactcctgagataactcactcccataactaacccactcccaccacacctaactcatccctgagataaccaagccactgctgagataacccactcccatgataactaacctgctcccaccacacctaacccatccctgagataaccaagccactcctgagataactcactcccataactaacccactcccaccacacctaacccacccctgagataaccaagccactgctgagataacccactcccatgataactaacccactcccaccacacctaacccacccccaacacacctaacccatccctgagataaccaacccactcctgagataactcacacccataactaacccactctcaccacacctaaaccatccctgagatgaccaagccactcctgagataacccactctcataactaacccactgccaccacacctaacccatcccagagataaacaacccactcctgagataaatcactcccataactaacccactcggaccacacctaacccatccctgagatgaccaagccactcctgagataactcactcccatacctcacccactcccaccacacctaacccacccgagataaccaagccactgctgagataacccactcccatgataactaacccactcccaccacacctaacccacccccaacacacctaacccacccctgagataaccaacccactcctgagatgactcactcccataactaacccactcccaccacacctaaccatacctgagatgaccaagccactcctgagataactcactcccataactcacccactcccaccacatctaacccatccctgagataaccaagccactgctgagataacccactcccatgataactaacccactcccaccacacctaacccatccctgagatgaccaacccattcctgagataactcactcccataactaacccactcccaccacacctaacccacccctgagatgaccaagccactcctgagataactcactcccataactcacccactcccaccacatctaacccatccctgagataactaagccactgctgagataacccactcccatgataactaacccactcccaccacacctaacccatccctgagatgaccaacccattcctgagataactcactcccataactaacacactcccaccacacctaacccatccctgagatgaccaagccactgctgagataacccactcccatgataactaacccactcccaccacacctaacccatccctgagatgaccaacccactcctgagataactcactcccataactaacccactcccaccacacctaacccacccctgagatgaccaacccactcctgagataactcactcccataactaacccactcccaccacacctaacccatccctgagataaccaagccactgctgagataacccactcccatgataactaacccactcccaccacacctaacccacccctcagatgaccaacccactcctgagataactcactcccatgataactaacccactcccaccacacctaacccatccctgagatgaccagcccactcctgagataactcactcccatgataactaacccactcccaccacacctaacccatccctgagataaccaagccactcctgagataactcactcccataactaacctgctcccaccacacctaactcatccctgagataaccaagccactgctgagataacccactcccatgataactaacccactcccaccacacctaacccacccctgagatgaccaagccactcctgagataactcactcccataactaacccactcccaccacatctaacccatccctgagatgaccaagccactcctgagataactcactcccataactcacccactcccaccacacctaacgcacccctgagataaccaagccactgctgagataacccactcccataactaacccactcccaccacatctaacccatccctgagatgaccaagccactcctgagataactcactcccataactcacccactcccaccacacctaacgcacccctgagataaccaagccactgctgagataacccactcccatgataactaacccactcccaccacacctaacccacccctgagatgaccaagccactcctgagataactcactcccataactaacccactgccaccacacctaacccatccctgagataaccaagccactcctgagataactcactcccatgataactaacccactcccaccacacctaacccacccccaccacacctaacccacccctgagataaccaacccactcctgagataactcactcccataactaacccactcccacattaagggcattaaccccttggagagggcagagcccctgcagacctctctcaatgccatggtgggggtgaagcttcccatgtgggggcagcgggcgacgcattcacagcacagcactgaccgttcctcgtgcaggcgttgcacaagctttgcttcctttaatccccagggttccctccgagccagctgcttttgtcacccccatgtaactgatgagactcctgaggctgaagtttgggcccatggccaggaggcagtgagccccagccacactccgtcacagtgctccgaactgcaaagctctcaaagagggtgtccaaagggaccaagaaaggcaccacccctgtatggtggcaggcaaaggcgttaaatagccactaaaccatggtcgctccactttcaggagaggaagggcatcctctcccaaagaagcaggtgacagtgcctgcctggccttggggaccacggctgtgcttccactccgcgccctgtttcacagacagaagtgctgctgtggtgggcacgtgggaatggtccatacgagaaccacacaggggtttctgagccagaccaaggtgccagctggacacttcccctccggggcacataaagggtccctgtccatggggctgccccatcgtcggcccctgcccctcccaattccacccggaggtagggatggctgtgcgaacattcaccgccggcacagcaggaggactgcctggtggccgcggaaaaggaacatgccatgtggacacattcaggttgaaccagcccttggaggagggacctggggccccactcgctggccagagagggaggccaagccctccctggcaaatgcagcctcccccatgccctgcacaaccttcatgaccctggacagggcaggtgatttggatgcggctccaggggggcacggaacatttgtgtgccaccttcaagatggaggggtctgcattttgctttttgcctccacataaagttatggccacagatgccttctgtgccgtcagaggtagaattcaattgcagtcgtagcaatgaccttccaaccactaggtaacatccatcagacgcttgtccacagaaacacctgcctgacaaccccgaggggctcacgtgtttatcacttatttattaattacatatttaggattgcttatttcagaaattgaaccactgtgtcaaagatagagaaatttcatgaatcttggtgccaagtcattttccagaaggtttagattagttttgtttcactgccagcaatatatgcttccactactttaattagaaagtgcatcacttctgattggaaaagtcataaatgcttttggtagaaaattctacacacacacacacacacacacacacacacacacacacaggatcacctggggtctcttgctgcagggaaaactagtatcagtattttcacactccatattattctgtaagatcacgtaatgcctcagcgcagttcgatccatgtatctggtgtctgccgcctgcattctgtttttatcactacgtcttgagtatttccccacgtcactaaaaattcttcataaacataactttgatggctgcaaacataaaatgtcaatttgtagccgtgccatttattcacccatccattatcaaaactcacggagcgtctgctaaattccaagagctgcctgggtggggcaggtccaggtggccctggtgaacgcagcacacacctgcctgccccccagagctcatgccccatcatgcccacaggtgaacaggtgccagcccagggcagccgcttccacgcaggtgtgggtcagaggcaggggcaggatccccaggaagaggagtcggagggaagagaaaggccaggagggcaggaaggtgtcctgtgagtggctgcgcatgcaggtcagggctgtggcagcagaaaggggacgggacggggtgggagctttctgtgccgctgggatcttgctttgagccttgtaggaagtgggagcgcagaggagctttgagctgagagggagagaggagggtgggcacagtggtcaggttttctatgcagagggaccactccggtgaccgtctaaggggggcgagggtggaacccaggggcctgtgcagagtctgatgctccgatcagccctggggtgagacggtgtgtggacatggaagacgcggtttcccaccctctgtctgtctctctctcgggaaagcctccctgtgtatttcaggactagccgtccccatgcacactgtggctgtcacccctgtggccttcacccggtagtccccgtcagaccctccaccgccgggatgcagtgactgcccaaggctgggcaggcgccctgagtggattcgtcaccaggagagaggcccccaccccgggcaccttgagcagcacagggccaccagggcatcttcatttaacacgagaggcagctgcccagaatccaccaccaaaaacggaagcagaggagagatgagaagcagcaccctctccggggcacagcctcgcccgggcacaccctcacccgggcacagcctcgcccgggcacaccctcgcccgggcacaccctcgcccggacacaccctcacccgggcacagaatcgcccagacacaccctcgcctgggcacaccctcacccgggcacagcctcacccgggcacaccctcacccagacacagcctcgcccgggcacaccctcgcccgggcacaccctcgcccggacacaccctcacccgggcacagaatcgcccagacacaccctcgcctgggcacaccctcacccgggcacagcctcacccgggcacaccctcaccggggcacaccctcacccgggcacaccctcacccagacacaccctcacccgggcacaccctcaccggggcacaccctcacccgggcacaccctcacccagacacaccctcacccgggcacaccctcaccggggcacaccctcacccggacacaccctcgcccagacacaccctcgcctgggcacagcctcaccggggcacaccctcacccagacacagcctcgcccagacacaccctcgcccgggcacaccctcacctgggcacagcctcaccggggcacaccctcacccagacacagcctcacctgggcacaccctctccggggcacaccctcgcccggacacaccctcacccgggcacaccctcacctgggcacagcctcaccggggcacaccctcacccagacacagcctcacccgggcacaccctctccggggcacaccctcgcccggacacgccctcaccggggcacaccctcacccagacacgccctcacccagacacgccctcacctgggcacatcctcaccggggcacaccctcacccagacacaccctcacccgggcacaccctcgcccgggcacaccctcgcccggacacaccctcacccgggcacagaatcgcccagacacaccctcgcctgggcacaccctcacccgggcacagcctcacccgggcacaccctcaccggggcacaccctcacccagacacgccctcacccgggcacagcctcgcccgggcacaccctcgcccgggcacagcctcgcccgggcacacgctcacccagacacacccttgcccgggcacaccctcgcccggacacaccctcacccgggcacagaatcgcccagacacaccctcaccggggcacaccctcgcccggacacgccctcacccgggcacagcctcacccgggcacagcctcaccggggcacaccctcgcccggacacaccctcacccgggcacagcctcgcccgggcacaccctcgcccagacacaccctcacctgggcacagcctcaccggggcacaccctcacccagacacagcctcgcccgggcacaccctcacccgggcacaccctcgcccagacacaccctcacctgggcacaccctcgcccgggcacaccctcgcccgggcacaccctcacccgggcacagaatcgcccagacacaccctcaccggggcacaccctcgcccggacacgccctcaccggggcacaccctcacccagacacgccctcacccagacacgccctcacccgggcacaccctcacccgggcacaccctcacccgggcacatcctcaccggggcacaccctcacccagacacaccctcacccgggcacagaatcgcccagacacaccctcacctgggcacaccctcacccgggcacagcctcacccagacacgccctcacccgggcacagcctcgcccgggcacaccctcgcctgggcacagcctcgcccgggcacacgctcacccagacacacccttgcccgggcacaccctcgcccggacacaccctcacccgggcacagaatcgcccagacacaccctcaccggggcacaccctcgcccggacacgccctcaccggggcacaccctcacccagacacgccctcacccagacacgccctcacccgggcacaccctcacccgggcacaccctcacccgggcacatcctcaccggggcacaccctcacccgggcacaccctcacccgggcacagaatcgcccagacacagcctgacctgggcacaccctcacccgggcacaccctcaccggggcacaccctcacccgggcacagcctcacccgggcacaccctcacccgggcacaccctcaccggggcacaccctcacccagacacgccctcacccgggcacaacctcacccgggcacaccctcacccgggcacaccctcacccggacacgccctcgcccgggcacagcctcgcctggacacaccctcacctgggtacatcctcgcctgggcacagccttgcctgggtggcctcctggagctcagtttggggaatgtttggtctcagtgggccctgagagggaagccagtgaggccctcgggtggagagcgcggcccgagtgcagatgtgagtgccaggcctggggtttccctactggctcctcacagcactgggtgatggggaccagggagccctgggtggggcttgggtccaaaggagctgagtcagggctggcagcacagcctttaggacagtggctctcacagtggcacctgggccggggggctcacggcggggcccaccctcaggacaggggggctcatggcggggcccagactcaagacagtggctcccgccctcaggacagcagcggccacctcacctgggagcctgtggggaccacacgttcttgagaccctccccaaacctgccgggtcagagcccccgtggggggcctgcaggggacccttacacaggcagcgttggaagcggctgtccgcaccggaaccgcctgcggagtgtgagggcgccggcacctgcccgggcctccccacggagctgacataactgccggggcgtggcctggacgccggacggtctaaaccatccccaggtgactctcaagcgcagagcaatgggagctgctgtccgggatggcgaggagtcagcctggctccagggccctggccaggaggcgacccactcaggggcgccccggagccatgcagagaggcctgttgggggtggttctcctggggtctgggggccgaggtccaggtgggcgggcagagcgggggtctagactgtgggcaacaagttcttaaggcgaagtcagttcggacatagtggcttggaggacacaggtgcgtctccaggcctttctgggtacccccacctgccccggcattgctgacggagtgccatggggcacccactttccccaggacgttctccacgccttcccccctgctcagagccagggacaccgcttggttttggaggcagtgatgtgacttgcgcgaggaaaagcagcttcctttcgagattcagggctgaacacaaggctccctccccgccattcatcatcactgcggtaatggaaaagatggctcacttccgcgcacacccgccgcgtgcccgtggtcattctgcttttacggaatcgtcatttgaagttcctttcccatgacccgagggagcgcactgttctaattacgggagataatctggaagacaatcacaggggaggagacggctgtctgggagcgtggcggggaatctgatttccatgggggctgactctgtgagtagatggccaggtgggggtgatctgggctgtgaggggacctgtgcccgcttcccagccacctcctctcgatggaccctgaggagagcagtcagggaagttgaaggatgaacagattgtcacttggcatgtgtgtctggggcaatggggagtggtggggactgcggctcagacccacggattactgccacccagggactcgggtccagagatgccagatcttctaaaattccaacaggaagtgccagtgtacagatttatatctctacatgtcagcagtggattcacattttggaagaaatggcattaagttaacaaatacgcactgggtctatctagatctgttcattaggcaggacagctgtggtgggataaataaccgattccaaaggcatcaggttctgatgtctggaacccatgagtctgtcaatttccatggtcaaagggactttacagacgagattaagttagagaccctgagacggagagtgcccttgatcacccaggtgcaccctgaatacaatcaccagtgtcttataagagagaagcgggccggacacagtggctcacgcctgtaatctcagcactgtgggaggccaaggcgggtggatcaccaggtcaggagttcaagaccagcctgaccaacatgatgaaacctcatctctactaaaaaaaaaaaaaaaatagttgggtgtggtggcgggcgcctgtagtctcagctactcgggaggctgaggcaggagaatcacctgcacctaggaggcagaggttgcagtgagctgagatcacaccaatgcactccagcctgggcgacagagtgagactccgtctcaaaacaaacaaacaacaacaaccacaaaaaacaagtgtcttatgagagagaagtgggctgggcgcagtggctcacacctgtaatccccgcacactgggaggctgagccaggagaatcacttgaccttaggaggctgtggctgcagtgagctatgatcacgccactgcactccagcctgggcaacagagtgagaccctgtctcaaaaaaaaaaaaacaaaaaaacacacaaacaagaaaaagacacatggagggagattcgacacagacagaagaggaaacagctgcgtgtgacggaggcagagggtgcagcagcgtggccaacggcgcctggagccccaggagctgggagggaaggacagaccctccctgcggcctctggaggctgcacagccctgcccatagctcagctgtagctcagtgaaatccactctgggcgtctggatgccagagctgtgaaagaagaaatgtgtgtcattttaggctgccccgtctgtggtgagctgtgacagcagccccaggaaaataatacaggaggctaagctggtgcagcaagcagaccccgaaacaccctgccccgggccccagcgctgcccttgctgggtgctgccgcccattctgtttgctggtctcgttccagcagcccccaggtggtgcctgcacctaccgggttcccagacactgctaaaggcagggggaggccttgcgggatgtggggcagccccacgaacgcagggtgggccggggaggtaaggtggggtgggagggaccctcgaccgccagggctttcccaggccagggctgagacaaagagaggggcccgggacccacctggcacctcggggtgcccatcctgtaatcctcacactgcccacgatgtcagcaccatgctgtccccattgcatagacagtgaggctcaccgtggccatgcagacctaccaggctgagactcctgggcccttctgagccacgtgtgcaccggccgtcctcacacctcacccacggggctcgggatggccgcactcacgccttacccacagggctcgggatggccgcactcacgcctcacccacggggctcgggatggccgcactgtgacttccgtgcctgagaaggcaggaggcggctgtggagcaggggtcagctggtgcccgggaggacgctgacaaccccgcccctctgcccccaaccagggaggttcctagagcccctatttatggccctgcagggcggtgggcagaacccggccccacccattcagcccacatccaccgggctgcaggcgtgtctgtcccacgcgacactctcagaatcctgagtttttgccaacattgaaacccccgtagatttcacctgaaaccctggagtttccacttcctcgggaggatccagcaatctgacagcctggatctgccatgcggggcagagatgggctggagtggatgatggccccgggacacccacggctgactggccccacccctctagctgcccgtggacctcacgcagccgccctggaggtcgaggggtcgtgccccagtttagatgaatgcagcaggatggtgggttgaatgagggccccaaaagctatctccactctgaacctgtggatgtgggagtaaggtctttccaggtataattaaggtaaggatttcaagatgaggtcatcctggactcggggcagcggggtgtaaatccagtaagaagcatcctgattagaaaatgagagggctcggatagtcacaggcagaaaagagaggccacatgatgtcagaggcagagacgatgccacgactgcccagtgtcccctgagcaggacaggcctgcagcagacctaggcccccaggggagctgcccctgccggcaccgtgactttggacttccggcctccagaacagagagagcgtaagtctccattgtgtacagccacccggtctgtggtcagtgctacagcagcaccaagaatcgcacaggagggcagagaaagagaccatgccaggagggcagttagagggcaagggcccagcagacgcccgggccaccacccgtcccctgttcttcagcagcagaacgacagtttgcttgatggcagcgggcgcaggtgaaaccccggcctccccgggtgacctcgccgctgagggtggcgcccgaccaacacccagtcagcaagactcgagtggaacttgctgggtggaatttctgagaaatatgtctaaaaaaggagactgctggaatctgaggttttcaccttttatccacagccctgtactgtttttcgtgcctggaaccaggactcaatgctcggggctggagcagccaatgtgtgaccatgagaccgaatgcctccagcaggaggggaggagctgggattcacgtggggctgggcttgtgagggtgccaccagccctccaggtctcaccggccacaccgcggttcggcatttcagttggggtcggtaacacgcagaagtaaaggaactgaggcatgcaaaggccaggactgtcagggactctgagttccctcacccagaggagccggggctgagtgccaggagtgagagcgcacccacgtgaggtcaggctgcctcccacccaacagccccacccagaaggacggggccggccatctcctggaggctgagagccctccgggaaagcaggcatttctgccggcttcctctgtgtccctgccccctgaagagtcatttcacacttggccgcctgctttcccagcacacgatacctgggatatgtgggcggctgtgatttttcaacttggaaggaagtgggctttcaagctcccagcttctctttgagtcactgatttccatctgttacagtgactgaagccaatattctgagagaggaaacagcacaaattgagaggcggccgggcacaagataatcggggaggaaggggcagagggagcgcgcgctgggaaggtgggagccacgctgtcctcccacgcaaagaggaactaggtgtggctgtggcctgagggaggtgatccccaaacagcccaaacccggctgtcctgttttggagcctccgcctgtccacagccatccttcagggcacccactctccctgggcacacggttcagggcacccgctctccctgggcatgtggcgctggcagcccaagacagggactcggccgcagctaaagtttcccataattgcggcctctgtgagccagaccaacctgcctcccgctgaaaagcactaagaatactggatttaaacaacaacatcaacttctaaaaagcaataaatacctgacaagatggcaagaaattgctaggccagaagtgaagggaaaatgggaatcagagaaatgagtgggcctgcaatttgctttttccctaagagggtgttctgaatactgtgactttgacatttcaaagagggagaaagggggaagaaatcagaggtgccaaatagaaaactctccctccgtaaacaggggtgagggtgaagcactgggggacctgccttcaggatgtgcagcctcggcgtggtccaagcaaccatcaaggcctgaactcggcgttagaggagcagcacgggcaggggcagcaggggcaggggtagcacaggcagcccccaggagcctagaggagcaaacaaccctctccagaggggagtgcctccagcctaggcctcgggttatgcctgcaactcaatgttcaacaacaatgaccagcacacagtcaaacgtaacaaggcacacaagggaaagagacactgtgagcaagtgccggcagagagagcagatgtggactccaggccagggcagctgccgtgggacagcgggccctccctccaccctcagatcccaggacaccagcagcctccaccgtgacctttgtccagcaagcaggactccaccctgtttgtagtgagggaaccagcagcaccatcaccttccggcaatccaggccctgcgtccttcgtgtgcgtgcgaccttggctgtccacttcagggagtgtggagggtggaggggagtgtggaagctacagcaggcagagtgtcccaccagctcccttgcccctctctttatttccactataaaaatgtaaaccaatttaacgtgcctggctattaattttgatgattacaaagtgaagataaaaaagagagaccctggtttgcctttgtagataatgtctctctctcccagcttcaattttatccactctctccaaatacaacagctaatttcattacagactggtcttttaagattacctggggacccaaactaataacatattgtcaatagtgaaaagactgactgcccttctgataccatgaagtcatgaatattttgcaggacatggcaatacctgtaaaatatattctcactgagactaatacagcgtttgataaatcttcatacataatacttgtgttcaacgaatatgaatatttatggggccaaagcaagggagatagggaatgactggaagtatctggggagaaggatttcctggccctctgcttccctttggaaagcatgcagggctctggaacaacccacggctgctccatgcagcaataaatgccaacctgacccaggtttgggtttaagggcggctgggagcaagggtgtcccatcaccttggtggccacctctgagagaagctgctgagaggaccagagtggttgggcccccacccctccccatgcccacgctgtcctctgatggtgcacacacctgggtccactggggtcagctctctgctcaaatcctgactctggaatctcctggaaatgcctgtcctttggacgcagcccagccttgagggtcaaagacaggaggagacctcaggaacccacacacggaggatgggaggggaaactggccctgcccttgctgaagcccccagtggagtccaggggacctggctttccctcagccgcttgctgaaggagagcctgccctgaacccctgttgtcaaggggcagcagaggctccacgtctctgcccccagggtggatccccttctgccggggcccaagccaaagatgaggttgtcagcccaaaacttgtgtcagtctgggctgctcaactccacatggatgcactgggacccaacctgccttcctcgtcttctctcgtagtccagcattccagatcctgtcttccctttctcaatgcttgtctgtcctcactctatagagtctcctactatatttattcaccctccactcatctacccacccatccatccacccactcacccacccatccacccactcacccatccatccacccatccacccacccattcatctctccacctacctacccactcacccacccatccatccacccacccacccatccctccatacatctgtacatccatccatccacccacccacctgcccatccaccaactcacccatccatccatccatccacccacccattcatctctccacccacctacccatccacccatccattcacacaccaatccatccacccatccactcacccatccatctctccacccacccactaatccacccatccactcactcactcacccatccacgcacccatgtatccacccttctacccacctacccatccatccatccatccatccactcacccacccatccacccacctaatccatccagccatccatccattcacccacccacccatccacttacccacccacccatccacccacccatctacccacccatccatacatccacccaagtacccagccatccacccatccacccagacatccactcacccacccatccatccacctacccacttatccatccatccacatatccacccatccacccacccacccatccatccattcacccacctacccatccacccactcatccatccacctgcctactcatccattcatccatccacccatccacccagccatccatccatacatccacccatccacccacccatccacccatccacccacccagccacccacccatccatccacatatctacccatccacccacccacccatccatccgtacatacatacatacatacgtacatacacccaaccacctgcccatccacccactcacccatccacccacccatccatccacccatccatccacccacccacccatcacccacccacccatacatccacccacccacccatacatccatccactcacccacccatccacacatccacccatccatccacccacccacccatacatccatccactcacccacccacccatccatccacctaatccatccatccacccacacatccacccacccacccttccatccacctacccaccatcatccatttatccatccacccacccacccatccatttatccatccacccaccgacccatccctccatccatcctaccagtcaatcaatacttactaagcacatactatacatcaggcatcatgttatctgtctgtccaaatcctgccccacttgaactctctttctgtctccatctttgctaacttttctgggacctaccatgtgggaggcactctgccaagcgcttcatatgcaccatcttgtctaatcttctccatgatcctgtcatggagggataatcatttttcacatttcacagatgaggaaaccaaggctcagagaggagtagtgacttgcccgaggtcaccccattgggattaggactcagatccatccaactcccaatgtgcagctcaaagattcctcttccatgaagctgtcctgaccttccccttcaaagcaatcccctctcctgcaccttagagagcagagagtgcaggctgctgcccccctgcctgactgtgaactcccagggggcagctgctcagggcactgggcacaccctgctgggctctgcacagtatggcagtcattcggtgaatgaagtgtgaatcggatcaaaccctctccccgatgccccctccaatttcccgtggaatcctggcattcatgcatcttgggcagagcggaactagcttccgtgcagtggagtcgggctggaaggtcgggtggacctcgggtggcggaaatgagaaaccacagtaacatctgccgaagcagcgccatcacttatcaagcgcgaccgggtgccgggcgctgctcccagagctttgcaggctccccttgtccagcgtcctcacaacagaggtgagtgctgttctcaccccaatttacagatgaggaagctgaggagcgggagactgggcggcctgacggaggtggcccagggggaggtggtggggccgggctctgagtccaggcggcccagcgctctagccacattttaaccacaaggctctgcaccgagcaactaagataatcagggtggcctcccccgtgtccactgcaaagtgctggagcctcagaatataatcagggcggcctcccctgtgtccactgcaaagtgctcgagcctcagaatataatcagggcggcctcccccgtgtccactgcaaagtgctggagcctcagaatataatcagggcggcctcccccgtgtccactgcaaagtgctcgagcctcagaatattaacaggcattttccaccattttctcaaaatagtgtgaaaatagccccttgcagaattcagaccccgtctgttcttttctgacttagaaataaaatcagggcttgctgggtttcacgccggagctgcacgcagagctgatgcgactgaactattctgtggaaagtaaaaatagcccctttctgccgtgggatgtgggcgaggttgcgccgcggctgctgatctgagaaggtcgcgtcttctgggccagtctctgtgaaggccaccagttcggatcccagttctgccattaccaggctgcgcatccacactcagccctggtgtccttgcgggaacacagggtccagagacggccttccacacagagcagagagggctgagccacccactcatactccccaccgcgtcacacagggtgtgagtgacacggcctcaggggaagacccctctatgctggggctgcaataaacccctgtgctgggcccattccgagatgccaatggggacttggagcatgagaaagcggacagcctctggccctgagaacagtctccagaatgttcgagagtggagggtggtggggacgcggggtcctggagagggcacggcaggcaggcagcccccgaaacggccgcccaccccctcacgcctgcaggtcttgggttccgtcatgtttcctcatcagcctttcgcctcctctctcactgaaagaagaggcaggcagaggcaggagctggccgcgggctgggaggcgaccccacagaccccagcgtcccagtccaggctcggctctccagcagaggcatgaagctggatcacagtcagtgcctgccccgggccccgacctgcaaaggggggtgccatgattctctaccatacagcctgtgggttcttccccagcccgaccccacgtccccatttcacgatgcatttttatgcccctattctgggaggaaacagagatcccctataaccgagcatatacttcctttaaaaatctatttagtgctatagcttcactaaaaaaggaaaaagaaagaaaaggaatttgcagttctcaacctcagatgaccttgcttccttcctccctgggaaacggagaatcaggagcacccgagcttcccaccctaaccacctgtgctcagggaatggccgtctgaggtgcgaggtgctgccaggacctcccgggtcctcatccctcctcctgccagggtgtgtccctgctctctttcctccgcttcagcaaattcccccgtgctctgtgtagtccctcagccaccctttcagatccgacagggacgcccaccccagcccactccctctgcagccacccagcctccttcccatcacgagcactggcgctcacatggggtactcggacccatagggacatttggtgagacctgggcaggtttggctgtcacacctggggaggggtggggcagctaccagcatctagtggttggaggccaggaatgctgcatggcctggcccccattctacaccccacagagcacagcctgcatcctacaccccacagagcacagcctgcaccctacaccccacggagcatggtcctattctacacccacagagcacagcctgcaccctacaccccacggagcatggtcctattctacaccccacagagcacagcctgcaccctatggagcacggtcccatcctacaccccacagagcacagcctgcaccctacaccccacagagcacagcctcatcctacaccccacagagcacggccccatcctacaccccacagagcacagcctgcatcttacaccccacggcacatccccatcctagactccacagagcagggcctgaatcccataccccatggagcacagcccctgtcccacaccccacagaagcagctggtggggtcagcttgcccagcttcggggacaggagccttgcactgcccccccaggccacaccctctctcctgctccttccactcgcgtcctcacagtgtgtgcccaggcccaggccttggacttgccactcttccgtccacactggctccctagcgtggggtcagctcctctccagggccacctcaccaaggagacctgcggtttttatgaattccaggatcacctgcgaacagcacaattggatcacactccagtgagtctgttaaaagcattaatttgttatccataaacgtgtaaatacaacataattttggtaagcctgtgttgagattttgtgtttttaaaaatcttcctaaaagctcaaaaacacggtggccagacccccctcgctcagtagaggctgcgcccagccctccccagctggccccaccttcgggcccctccagccccggggcccagccttgtcccttccaaccagggcagggaaagaaggaggaggggtatcggtggggctgcacaggggctgctgggagcctcaggaagatccacggtcgacctggcacctctagatttcattatttccctggcgctccacagggtcgaggatggcgtttcaaagaacaattgcacttggtttatttacttaaaaataaaacactgatgggcacactggctcatgcctgcaatcccagcactttgagaggctgaggaaggtggatcacttgagctcaggagttcgagaccagcctgggcaacatggtgaaaccctgtctctatcaaaaaatacaaaaattagccgggcatggtggtgagcacctgtaatcccagctactcgggaggctgaggcaggagaaccacttgaccctgggtggtgggggtgaaaccctgcctcgaaaaaattaaaaaaataaaaataaaatgctgacagccaagggcctgagcacagcccctctggccaggcaagcgtgggcggcaggacgctgaccaagaacgctggatgatgcatggggctgggcgggcactgggcaggcctgacccagaacgagagacaaggtgggtgctcggggaacccacatggatgcctctcttcagggccagagctggggccctaagagcacctgcccttcgtgacccagctttcagtccagcctccaacacaggggcctcaggccaccagggacatgaatccgccatcccatcagcacagggcctcagggcctcacaggcagcatccacgcttgaaccctggtgcagtgtcgcagctgcagccgtaggatcacgcagagctggtgatttgcaggttcagggccgccctaaacctcctggtggatcctgggatgtgcaccccgactgacctcccagctgggcctgcagccccgtgtgtggccagcgttgatgcacagtgcacgccgtgggccgcctgccctcctctcgtctgcctggcaatcccagctgtggccgggtccactcaaccctacacatcgtgggagcaggtccagccctgctcctgccccagcccgggccagttatgaccaggccagtcccacagggcactcctcccgccctctgccagtggctggctaggtgctcagagatgacagtcctaacggagaggcaggaagcctgcgtgtccccagacatccctgcggggcctcccgcctttcagggccctgctcatgcacaccgggcagctgcacgggtcctttggacttcggcagcgactctctgggagggaggagcagagacagacctgggtgtccgtggccgccaccgagccaccaagcctgcagcgtgcgtgccttcatgtgaggtgtgctccccatggttgaagctagttgtgatggtgaattctgcatccatagagagggccttggatgcccaggtggctggaagtattgcttccaggtgcgtctgtgcgagatttgagtctgaatcagggggctgaggaagaaaggtctgtcctccccagtgcagacagggatcagccccttctcggaggcccggctggaacagaaaggcagaggagggcagcttcatgtcctgtgtgagctgagacctccctctgctcctgcctgtggacatcgggtggagctgccaggtctcgggcctttggagtagaagttatgccgttttcctcagcgtgaccctggctcttaggtctctgcactcaggccaaaggaccccacccagcttcccgggcctgcagcttgcagacggcagatgatggggcctcttggtctgcacagtcacgggagccaatcctcaccctacatctcctcttgggtctctctctatccgccggctcctttcctcgggagagccctgacgcacacactagctgagtttgcttttcaacaggcctttccgtctggggcaggtcaacaccccactccgccacacacacagctgtacccggcacaacacgcggccacaggtcacctcaggtcgcctcgggtgctcctcccgcagccccacgtagacagaagacattcctcgggcctgggtgcccagcctcccgcgtccttctagggagaagccggatttcctgtagaacctgtgtcttctccaccctcagcctccggaggttcggaggcactcactgaccccgccatgcaggcgggcacacgaggcaggcgctcctaaggaaaagggggcggccagcggcccccaccgctgggtcacgctatcccctctgccagaaccactgggccactgggtcccgttagcgttcactctgtcagacttgagttttctgtagctgaaaatcaaagatctcagctgctaacagggctggcgagcctcaagctgctcctgcagcgacatccccaagtccgtgtgggtacaatgtgccagggccggccgccaagcccaggagcctccccacagcacatccacacacgcgcttgttttatttttatttgttgttgtttaaactcacactgagaggcacagaacgcccggggagggtgctgcgtgcagagccgggacctcacttcccgggttccgattccgcctcgaggacgcgggtgcggcagacacggcccagagccctcgagggccacgaggcacagacgcccccacctcggatctttctggattcctggggaatctgtcgtctctacagaagcttgagttcatattacttaacagtttcttttaaatcgactcatcttttaagttaaattaattcgtttcttaaataagtgatggattggcaccaacaatagaaaacatgtatcgttttactagtaaatatcagtaaacagaatggaaatgggatgctgcattgagagtatggccaggtgtgtctgttagcaaagcccgtgtgcctggatccgtgggacacggtggaggaggtggagggaagctccctcggcatgatctgattctctccaactccatgtccctgggccagctcaaggcctccgcccccaccaggtgccctcggggttggagaatcatcagcccaccctcatctcagaggcgaggggaggtgggcggcgccagcgggggggtccttctgctgtgccgcgtgcctccttcagtgcccacagggccccccgaggctgttgctccgggcatcccccctttacagatagggaaaccaaggtgcaggggtcgtgtgaccggcccacagtcgtgcagctgaggagggaggagctgggtttgaacccaggcggtcgacgccacagtcagtgaggcaggtgcccagggtggactctcgctccaggggcctcctggcgtcccagcggggaggagggtgcctggcagtgggtggagccaaacgctgctcaacatccacaacccacccagggggcggccccgccaggaagaactgccccacctgtgtcagccctgactgagggtgcctgtgggtccggagtcgaggcccctgttggtccagagtcgaggcccctgtgggtctggagtcgaggcccctgtcggtccggagtcgaggcccctgtgggtccagaatcaaggccatggtacaccagctgctccggagaccttggtttcccgtctgctaatgagtcgcccgtctcatctgggtcctggcagatccgagtgaaactgaaaatgtgcttcaagcagctagtgagacgggcaccaccagagatgggacctcagtgcccccacaaaacaggcacccacagtgtcacatccctcgtcaagaaccttctggcatggtccggagcctgggagtgcagccagcacccttccggggccaacaggctgtcctggcagccccctgccctagcacctcaccatctccctcactcacttcgccctgaccaccccaaccccagggcccactgtggcctctgcacctgccaccgacacccagcacttcccccggattctctcctggcagctccttctcctcattcacaattcagagagtggctccctccccacccacctgtgtgtgtcccaggtcactgcagtggcaccgagtggggaggctccaccccacacacctgtcccctcacacacctgtcccctcacacaggagcccacacacctgtcccctcacacacctgtcccctcatacaggaggccgggagttggatgtcaggcgcgcagggccacactccctctgaaggcagtgggtaagacacatcctgcctctccccagcccccgcctcggccccctgcaccaccccagcccccgcctcggcccccaaggggcgtcctcccctccaaacccccactgtctctcctcgtcttagaagggccacagtcattggatttagggcccactaatccccagtcctggctgagggcatcttatctaattacttctgcaaagaccctgtttctaaataagccacattccgaggttccaggtggacgtgagcttccgggcgggccccgttcaacccgtaaccatccccgccacccagatacccattcgtccacgtcactcaggcctcctcgtaggtttgtctgagaccatctggaccatgcaacttactcactccccgtcttcctccctgggatgtcagcccctgaggtggggacatctctgctcaggcccgcgtcctcagcgcagttcaggaatgcagcaggtgctcacgaattcgccaggaaggaacggacatgcggcacatgaggtggtgccgttgctcactgagacaggccctcagctcataggggctgggcccgcaaatgccagttcgagcacagcaagcacccagcatccccgtccgtgactcagttgccccacagaaggctccgggaggggtgagtgtttgcacagggaatgggggcgtctgcccaaccccagctcctgtcaccccttcacagtttgccccctcctacttccagaacgtaggaagcaccatggcgtccccaggcatgggaggggggtttgcaggctctgcgaggatggaggtgggagcaggcctgggcggcttcctgggagggcctggtgagcccaggggaccgggcgcagagcccagggccgagctgcttccgtgctacgagatgatacaacccttggcaccttttaaacgactggaaaatgagtttctccttcctgtgaatggcagctagaggggggactgtcagacttaggctgacaccagtccgcttgctgagtggcggggcggccatcgctctcctggccgtcccgtacgggaaagcccaggccacaggggcacttcctcgggctcgagagccgtgcgtcagccttgccccctcctccagcgcctcccggcttctccacctccttgtcccttcacaggcatctgtgcttgctcaagagaaaatgggctgctgaccacacgggtctcaagacatggatcccatcctgcccgtttgtcctcagtgggagatctgacatggaaatttacagacttatttttgtcaagtttccagccaatgaaggataaactgtcctttcagaaaatagttccaagactctgaaatatgcaggttgctgtgctgaattgtaaatgcaaacactcagcccagcacacgccgacgctggggatcaccgcctgcctgggtcgttcctagaagctcgggctgctgcgtttgcagacagaaggctgccgaccgggcctgctctacgcaggtctgctccgccccaagggaagtggctgacaagtgtttaggaactcatctcccccaagactcaaaggggcaggtctgcacagaggccaccctccgggttaagggaacgggctgagtggctctgagtggtcagatggggtcaaaatccccagcgaatctgggggcagcgatggggaggacagctgtgtgtgagtgcaggcaaggaagagaacgcacaaccaaaatgtcgttcatctcagccaggaaatgccaggctcctccgagtgccgggagccccagcggacgtcagaaaaccggagaggcaatccccgtccagtagccacgaaccagcctcatcgtcggagtcagagtgggggctctggccgtgggtagtaactattttttcagtttttgtagtaaatccacaatcatggggaagctgtgaacctcggccggggcgggggcccggaagttaatgatccgggtggaaagacggtcaacgctgctgccactgtggaagcgagacctgccggggccgggactgaagcctccagggcgctgcagctgtcttcccggccacggccactccggctgtttggatcagcaacgtgggacgttgtaatacacggagggaattcaggggagggtagagacgatgaactcaagctggaaaggccgcctgaaccagcaggagccatttgggaaataaaactcacaaatgaataggaaaagctttctgctggaaaccgcacttcctagcaaggagaatttctcaaagcgtttccaaaatggaaacgcttacgcagagcagagcagacgcttggaaagccctttttagaaacccacacctgacaccctccggagctctcgagggagagtgtgccggagccggcagagtgggggccgcaggacattccgagacgcacgcgtggcggcagccaggcattgcccgggccgagcctgtgcgcctccagccgcgccttccgcacgaccccgcgcgctccgacggcgctgtctgtgagctcctacctggccctcactcatcacgcgggactgacggggcacgtgctttgtgccgcgcgtgcaagagacgctgtcctcgtacggctgacctgccggggccgcgtccgagaccccggaccagcggctatggatgggactaaggcagtgtgggccgactgcctgtcacttgtggcagcggggggtctttggactggctccccaagttcacgctctcagctgtgcagtctgcctgctgctgaagcagatgccatggccccggctcttgtcagggagacaccctcccatctagaccgccgccctctgcagccgggtgcaaggcaagtgttgggtggcctggcattctccccccaccgcccctttctcaccccccagcctctccattctggttcagccaggtcttcactggtggtcactcatggtgcccggactcctggcagtgttttgcgtccggattaaaggtctgggaccccactgtggcgaaggcagcctggggagatacgccccttggcaacctgaccaccccttccccaagccctccagccccacaggaacgtcccctcagctgctgctctgaacacacactggggcttcccaaagcaggggctgcgtcccggtgggcccagcttgcagacatggctgtgggccatgcacgggcacagctttatgagatgccaccccacttcagaccttgctctcccaagttcttccggcgtcgtgctcatgtggccccggctcaggcctccctgggggacagggcaggccttggtggggtgacgcctgctggagtctccaggctgttcccacggcactcagtcaccttctactcacgggtgcgctggagacacacaagtgtctcttaagttcatttaaacaaaacaatgaattgtttggagaaaaaccctctcgcttgctcactggacagatattcgtggagtgctatgttcacagtaccgccagaggccttgggcatcagagccaggaccagacagacacagcctcgccctcagtggacacgagcgaggtgtcacacagtcatggggggatgcatgaggcacgtgggaattcctgaggctggaggaagcctgagtccatgtccccagagggggggccgtgggcaggatgagcgtgcaatgagcgtgcaccacactccaaccttctctgaccagcaactggctggccacagtggggccttctgcttttttaatgtaaacttttagtaactacagaaacctaggtccctctgaaaccagcgccacctcgctggacctctctgggccccgtggcccaccccgctccaggctctcagctttcctgctgctcaggcccagacctctcagacctgggacctgggctagggcaggtcagtgagagggaattcacacatgtgctctgaattttagaaacaacctccctcacaaccaaccaacaaaaggaaaacttcccatcgccatccctggctccatcctccattcagagcctttcttcctgaggggcaggagggccaggaccgcgccaggcaggggtgattctcctctcccagcagagtgagtccagccgctgcgacgcgggcgaccgtgctccctggcggtgaccttcactcgctccacgcccacagcaacaaacagcctggcatgccttagcgctgcccaggcctcgcatggacacaggggtaggccctgcaagcgcctagagaaagtgggggctctttgtctctctctccccttcccatctcaaggggcttgaaaattttcttaaaggcagaagggtttgaatgcccagacaactgaatggagacagttcttccccttcttttccttgagtttagaggctctgaaatttagcgtttatgagacttactgtgtctgctgcgcacaaaaccatggatgctgtcttttatgtgcaactgaagatattcagaagggtggtttttgtgtataaacattttttccttgccttgagcgctgaacttagaagcaaaccttgatgtacacataggagtgactacacagagcttccttaatgaacatccctctggggccttatgaatttgaatctgcacacattccttaggagttctttgccaaggtcaatggatatcccaaagaaaggccactggaccagcggaggcagggtgtgggaagaactttggattctgggcccctccccaccccagtggccctcccgctcctccagctcccatgaagacgtggacttccttccaccaggcccctcccagccagcagaggaattccaggaagcaatcaaggcagggaaaagggatcaatccattttgtttcggatttccccctctcctttctgaactcggatggattagtatcgagtgggagctcccaggaatcaattttgcatcctgggatgtcacattctggaacaggctgtgatctaagagctggccgcctcctccagggagcttcttacacaccttttagcactgagagcctgtgccaacatcagagcgggtaatgctgtttcaaagggcctcatggcgacagacatcaggcctctacggcaccgccctccccgtagggccccaccgggggtgagagtaattttggtgtctcccatcatttcctggggcaaagattgactgactcttgggtttagacactgtgcctggcctgctggtcacagagaggaacgcagcacagcctcatcacagagggggacgaaactcggcctcatcaaaaggttgagggcaaagacagaggcagacagatggcaggggccgttcggagaaaggctgacaagggaggacagctaggatgaaggaaagaaggagaaacaattttaaaagaaagaaaggaggaagggggagggaagcgaagaggaagaagggaggggacagaggacaggaggaagcgggatgggagaaggcagtgggggcggtgggcggtggggggagacacactttcccggaatgcttccttatctcccgccaatgtcagcaaagcggatcatgggtcctggctttttccaccaccaagaatcccagccgattctcaccttgaagggtgaggcagggaaaacgactcacagggccgagctgccctcgtggtgttacacaacctcagtgtgctgccaatgtttttatgtaatcctctggctctccccataaaacagaccataacaccatggcgagcacacttcaatagagccatgtgctattgccgggcacaccgccttccgggagatgaattgctctgccgggcggctgggcggctgcttgaactacttttctcccctcgtggctccagctgaatcagaaagatcagagaagccacagagctcaccaagcacagctctgcgggaaagtcagggattctgtgggtgatgggaaggcgctcaggaagtcagggtgctctgagtcagacaaagctgggacaacccctcctcatggggattcacctccccctcccaccccacggcctgtctgcagcccaccctcaagagagggtgtggctcctgaaggaaacgcaagaccaccccccgcctttgcccccacacacagcaggcacatccggagcccccgcctgcccgcgtaaccccagctcccgtcacctcccactcgagcctgttacggatgctttctggaggaggtttgctggggctgccaaggcagaagcctgaatcatcggcacggaacggaaagccacaccagctagtgatgtaggcacatgcaaactttctccttcctggcgccccggtgcagagtggccttgggggcggctgctcctccgggaaggtggagcagctggaaaagtgcttgctctcagcagctgtggccgctggccctgacctgtggtgatgccggtgctgctcctcgggctgacctacgtccgctcgtgatgaaacagacccaccgggagctggaggctttcatggattctggggctcccaggtgccacaacttgggcccccctgggtaatgagtcctgccaagccctgcatgatcctcaactccatcctcccaggagtctcaggtctcagcttcaagcttctcccataacaactttctaacgcggcctcgggcacccccaggacagggggccgcctagcccagtggtcgaagcatttggggtgccttcgaacctcaggggcaaaggacactgcaccagcagcctcccaagtgtggcgtccccaccctcctctttccccaccttcaagagtggaggggtcggcgcagcctaaacctgacggcccccactcctggagcgccaagccagccccccaccccacactcctggacctaggcactgcctgcttctagagcagctccaaagatcctctgcagaagttccctcggagagcaagtttgcgtcattgtgggggcagggggattcctcaagtctccactggaggggtgggtgcccggtgcggggggaacccaggttgctgcccgctgctgaaggggcttccgcggcccttccctctcctctctcctgtatattccctcccacaggggcgcagaggggcgcgcacccgaggccggcctgacccatcgcgcccggggtggccactgtcccgggcagggctgcccccactccgccccggcgcccccgctcaccgttgagctggttgtagaccacctcctccaggtggtccaggcgctgcaggatggcctcacggtcccccagcgtgcccaccttggcgtgtcggctgcgcacccggcggtcgccgctcacgatgcgcacgagctcctgggagcggccctgcaggcggcagtacacggagaacaggacgatgcccacgaacaccaggatgttcaccgtcagcaaagttcggatcttcctggccaccgccatgaacacggctgcagcgggggcctcacccgcggggcatccccagcatccccgcccgggcctgggcttcagcttcggcttcggggaccatgagccgcccggggctgcgggggctgcggggctcggccggagctgtcccttcagcaccagctcagcgcgccgggccacggccgccgggggtcccccagagcgcagagggctgcccggggctggggtcgcggggcgcggccggcatcccccgctcagagggcgcggccccgccccggggagcggtgaggggggccgggggcgccggggggcggcggggaaggcgcgggcgggcggcgctcggtgtctgtgccggctcctgtcctgcccgccccgcagccaccgcgccggtgcagagtgacgcggcctcacctcacctcatctgcaaccgcggccccaggaccgccccgccccgcctcccccacccctcaaggccgccccccgggaccgccccgcgcgcctgccccgccccccccaccgcgcccccccggggaccccaggacagcaggtccggggggcgggggacggggggcggggcgcgcggggtagcctgggccaagggcgcgcgggcgcggggagcgggggcggggcaggcgcggaccctccctccccaggacccgccagacgcccggggcccccaacggccagcacggtccgaatcgaccccaagcttgacccgagggcagcggggcctccgggaatgcctggccagggcggtgtcgccgggagtgaatgggggagggggcggccggggcaggacccgggtcagggccactctggtagtctcctgcccacccctccccaagccgagctcccggcctccctccctctcccccgtccagggctgaggactggggaagctgagtcccgggacgggtatgggggggttggggcttgggatgcagccggacctccgggaacagcagggggccctggagccaccaggagggagaaggccccgtccctgagccaggctcgcaggtaagacccgaggccgcaaaccccggctgcccccacccccagcccaggctctgatctggccccacactggcgttttgtggaggagaccctggaagccaggggagatgtcagccaagccgcgcagcacaggggcccaacttccactggcagaatgcaagcacccaagaggcaggagtttcacccaaaggcagggttcacccctgtgttcccagagattggacacatagctggtgttcagtaaacatttgcgggatgagtgaataaatgacggagcatttattaagagcatggctgtgcttggctctccatacagagatgagtaaggcaaggggcttcacagctcttggctgtgtgtgtgtccgtgtgtgtgcatgagtgtgcatgcatttgcctctgtgtgcctgtgtatctgcatatgtgcatgtctgtgttgtcagcacgcatgcatgtgcatgtgtccacgtgtttctgtgtgcatgtctgtgtgcccgtgtgtgcatgtatctgtgtgtgcatgtgcctgtgtctgtgtgcattgtctctgtgtgtgttcatgcgtgtgcatgtgtctgtctgtgcctgtgtgtatttgtgtatgtgtctatgtatgt

SEQ ID NO: 218 - DNA, 19572 bp, Homo sapiens
  source 1..19572: mol_type = genomic DNA
ccgtgagggagcagcctagggactaaggcccgctggctccgcgagatcagccaggcccgcatcatcccccaattacctgcagagggcgccgcagacacagagagggcgaggccgaggccgaggccatctaagcttctgggaagggggtcccaaagggaggccccgagctggagtccagggggcttggaaggaagaggtgaggacagcagaaaaggaaacgcaaattaaaagaagggaacgaaggctgggcgcggtggcttacgcctgtaagtccagcactttgggaggccgagtcgggaggatcgcttgaggtcaggagttcaagaccagcctggccaacatggtgaaacgccgtctctactaaaaatacaaaaaaattagccaggagtggtggcaggtgcctgtcatcccagctactccgcaggctgaggtgggaggatcgcttgagcccgggaggtgggggttgcagtgagccgagatcgcgccactgcactccaggctgggtgatagagtgagacccagtctcaaaaaaagagaaggaaaagagagaagggatggtggcggtgggggaggaaggcggttcttgtaatgatccgagaggagaccgcagcaccggttacgccctcgaacctcggcctcctcatctgcagaatggacgcagtccacaccgcgtgctgtggaagggttggagcgccggtttacatgacacagggctatcggctaagggggcgctgggaacgtggaaggtgctctatggtggggcgctgtagggtgctcttgggcagtagggttggagtcaaatctgggttgaagtccaacctaggttgaagtcctggctgccacctgacctctgcccctcagtttgctcatcagtaaaatggggttaaggaggctgcctcgcccagctccacggagccggaggtgatgaaggtcctggaagagcagaattcagaacccgagctttgggcggcggagcaggacagggcgcgggtgggcgcggcctccgggaggccagcacgagggggagcggcggggcccggacacacccagccagaaggaggaggccgaccccgcgccgactccgcagatgccgctcgggacttcgttgtccctccaggcgcccgccctggggtcctccatcacccgccgtcacctgggcgcggggaagctggcgggaggggaggcggggcttggcggcagcggcgggtgggggccggggagcgggggcaggggcgggcggacggagcgcggggctggggacccggggtcccagaagggggcgcggggacggggtccgaggagagggggccggggcggggcagggcggacagggctgggggcggaggtccgggggtgggtccggcggcgagtccgggtcggggcggacagagcagggggcgggggtccgggaggagggggccggggtccgggaggagggggcggggcccgggggcggggccggggtcggcgccctgcggggaggccggccacgtgacgcccgcggcccggcggggctgccaggcggcgagcgccgcggcggccccgggaggtggcggcgggcgcgagagcctgggccgcgcgggactgaccgtcggggccccgggacggcggccccggggcgcccatgccatggagaagctggcggccgggctggccggcctgcgctggagcatgggcgccttcccgctcgacctcatcgtcagccgctgccgcctgcccacgctcgcctgccttgggccaggtaccggggtcgctggagatggggaccggggtccgcggggaaatggtgggctctccagccaggggccagagggatcgtgaggagggtgcggcacccgcaccctcccagctccccggcgtgggccccgagcggttcctggcgcgcctcccgggagacgcggggcccacccgccaggtccgcctcctgggccccgcggacaagcacaggcacagacaccggggacagggcccgggacagagttttcccgcccagctggagtccggaaaggggccgagcccctgctcccgccccgtcggttgcccccctttcccccgctgcccctgggccccccgccccggccgcgcccccttggtccctttgtccctggcctctcacctctgtcttccctcatccctgggacccggactctgtcttccccttaccgccacccctagtcctgctccgcccctctggggacccttcttgcacctcctttctcttccctaggagcagcctcggtcctggggcgggcaggccaccttcgggagaggccggcgggagccgggtctgctgcccggcgtgacccccaaactcccggccctcccccgaatcttgtcccacttcttaataggacctggggcccccagccgctcggctgatggaaccacgcatgggggcccgagagggtacgcccggaggctgcatggagcgaggggaccgtttggggggaggggggtgctgcttggttgggggatgggcggtagccggggctggcagccaggccgggggttttgtgtgtgagaagaataggggtttggcccgcgttggcacactcgcttccatgaatgctaatggggcccgcggccgcaggctcctcgtctccccgtggggcccggcagcccctcctccgtggcggccaggagtgggcacagtgggcgtcagctgtcccgggagcaggctcatgggggagcatcggcgccccgccgtcgggcaggccagcgtctagttctctggctcgcggccgagtggtcagagtgtggtactgtgtctgcctgtgaatggaggtcgctgccctggggtcttctggccacttcccacacatcctttttggcatctcccctttctgggcagcttttctgagctcctcggtctgcgtagggcctcctttgggctccccggccacctcatgccaactctggcttgtctcctactgtgcaccccattataatggtcagtcagtttattgtctttagacctggctgtgggctccttgagaccaggcatccttgcccaataaagattatggattgaatgaatgggtgagtgaatgaacaactggtgtgatggcccagctgtctgttgtgtgtgacagtgtgtggctatggctgggtcaccatcagggtgtgaatgtctggtcagaattgtatggcttgaagggtaggtccctgtgtgcctgtgcatttgggaggggccccttggccggagactgagttatgttgtttgggtgacaagcatctgtcactgtgggctattgtggttcagctgttggtggtcatgagccatgattactgctgtgtgcccatgtggctgtgaagatggggctaggacccaggacagctctcagaggagggagcagagttggaggagagcttcttgggcccccggaggtgaggaggtacaggggaaagcttagacaacacccccaacacacacatagtgggggccaggcccttcctgtgcgtcttgaaccgcccgccaccctgccacacacacacacacacatacacacacacgcctaccccacatgtacacattttatggagcccccagccatcagagtaaaccatttcccatttgattggcagaaattttgtaagttgtgcctgaaggagaaaggaaggaggtactccctacccccaccctccccaccagctgcagcccggacacagccccttctgcctcctggaagctgggctgcccctcctgctcccctggaaaccgttgctggggttggcgcctccaggcccagacccctcccaactcccaacacctctgccccagagcagcttcccccaggccccagggctgggcctcccactcctgccttctaaacctgctctctcaacccctccaaccctcagccgtcacccctgtaactgggaggatgagggggcgtggggagggggtgtcaaggagctgcttctctgagatggggttgggggtttctggggactcccccctctccttcgaggtccccttgacaaggcagtgggtggcttctctgagatggggttgggggtttctggggactccccccctctccttcgaggtcccctgaacaaggcagtgggtggaaaggaagggctgcccttgggagaggcagtaatcagctgctctaagccctgtcattctcctgacctgagcgacccgtggctctgggggagctctcacagctgggaccttataagggacagtcccgtccgggccctctccactgccccagtagggcccttcttgcagggcctaggccctgactgggaagcacagctccagcatctcctgctcaataaagtctcccttcgccaccacacccccagctggagcctactgctgccctccgggtccccagacatactccagtcagtgcctcaaacttgcctagtctctggtacatctctgcccacctccccaggggcctaagggctcctggagggcaggggctggtctgggctcatccatggggagctccccctgctccagctcagagccagggacagcaggcattccagccactgatgaacgaggggccccgtcgggagtcacagccctgagaggctcacagccagccccacagccccaggccccagctggcagcccgcctgtcccttgagctttgctgacctggacagggattgtgtggagctgtccctcaggggggcggtcttggtgaggacgtcactatctgttctttctgccccttctaatgtcctgtcttccttcccctcatcctctgtcctcctcccccttcccaggggagtacgccgagggcgtcagtgagcgagacatcctgctcatccactcctgccggcagtggacaacggtgacagctcataccctggaggagggccactatgtcatcgggcccaagatcgacatccccctgcagtacccaggtgtgtccagccaggacagatgtcataaagcctgtaggggggtgtaggcaggagggactggggccaggggtagggggaacgctgggactagcgaggcggtgattagggttagggttggagtcagagcccagcagttttcattctgttctgtggcactctgggtttctggagaggtggctcacaggttttttgattcacattttattttaaagtagatttgaaactaatgattaaaaaatacccacactcttaaattactacacatcagagcttaaccctaatcagaggccttcagggtataccttcggctgccacgcttagccatctttgtgcagaccctccaagagaacatgtcctgccaggaccttttctgtaccgcgcaaccaaataccgcagaaaccagcgaatgcccaagctggttacatggctgcacctctccgcgctgatcctgtttttcccaatttttgcgttaaacctattgtttccattggttgactttataagtgaatattaaaaattttagacttctaaagattatgctaatggactacctttattagttttatacgtgacgttgacatataataagattttgtttgaagaaaggattctgttaccaaaacagagtacagccccttccttttacagatgatgaaacggaaggcttgggggaggaggtgacttgccccgtgtcacacatctaggaaaggaagagcctggccagatccaggtatctcaactgagggctggtgtctgctgcactacaccaggagcgtgtggttgctgtcccctgtgtgggagggatgggagtctggtggccccatcccagagacgtccccgtgtgagccccggatcccacatctgccatgtgttaagcatgtgctgcatgccatatgctgggccgaacatttttgccatttcatcctcatggcaacctgatgagaaagtcttgtcaactccatttaactcaccaggaaactgaggctccaggagtttcagtggcttgcccagtgccatgttttttatttcattttttgtgtttttagagatggtctccttatgttgcccaggatggtctcaaactcctggtctcaatgaagcctcctgcctcagtctcccagagtgctgggattataggtgtgagtcactgggccaggcccagttctgtgtgtgtgtgtgtgttttctgttgctcaggctggagaggagaggcgccatcttggctcactgcctccgaggttcaagggattctcctgcctcggcctaccaagtagctgggattacaggtgcctgccaccactctctgctaatttttgtatttttagtagagacagggtttcaccatgttggccaggctggtctcaaactcctgacctcaagtgatccggccgccttggcctcccaaagtgctggaattacaggtgtcagccaccaaacccagcccagttctgtgtttttaactgctgtgcccagctgctcctgacaaccccctcaccaaggctgggaaggtcccattgcttcttcacaggtacccctgcctcctctggccctgggtctccctgagccaggaggacaggactgagccctttacagaggcttctgtcttttacagcctgtgaagttggtacctgtgtactccaccccccaaacccttaaaagatgtggaaactcactcagatttctttctgacctggggttctatcttgggcttggagcccactgggggcctgctcaagctagaaatttccaagcttggttcagggggaggtcccaggtcttcttgggataaaaaaagcaaaagttgcctgagcagtggctcttatatgtaatcctagtgctttgctgagacaggaggctcctttgaggccaggagttccaggccagcctgggcaacatagcgagaacaaacaaaaacaaaaacaaacaacccccccccccaacaacaaataaattagctaggcgtggtggcgcaggcctgtagtctggctactggggatactgaagccaggtgggggggatccctttagtccaggaggttgagcctacagtgagttatgatggtacccctgcattccagcctgggagacagagcaagatggtgtttctaaaataaataaaaattaaaaagaaaagagaaaaagaaaggttgggaaaatccctcactgaaaaaaacgtgactttagggacttcattttggttgtgtcattaaaactctgggaacccaaggcacagtctcccagggaaccgtgggtccgggggctcctagctcttcctcccatctctctggcgcccctgcgtgcctgtgtacggtggtggtcttggaggggtggtggtcttggggggcgcggccccagccccatcttttcgcggggctgcttctgtccgcccgcacgggggaggggaggaggaggcggaggcggaggcagaggcccctaggagggcgaaggccggcgggttaacgaggaggcgctgagtgcacggctgggctccacgctgatttctcctaatgaattaataatggcgctcgggcgggcgggggtggccggctgcggaccgcggagagagccgaggggaaggccgtggagggaggaggacggcgactcgcgccgggtggggctgaaggcactgcggggtgactcggtctccaggctgcggcgctctgctccgggagtcagggagacctggcctggccccgtactgtcccccgtcccagcccccgcccctggccctgcgggaggggccaggcgtcttccctgagcatggtgccacttccccagtgttggccttgtttcctgctcagcatttggcagatgcgcctctggcccaactaggatgtttccattttacagacgggaaatccgaagcccagagagattaaataatttgcccaaggtcacacagctggctagtggcagggtgggattcagccagatttgtcgcactccaaagcctgagcttttacccacgttctttactgagtgtgtgctgtggggcaggcatggagaagggtggtcagcaatcccctgccacagccctcaggtgcttggggctggaagggaggagcgaggcagccatgtgctctgagggcaaggacaaggaggaggggcaggtcaggatggagcaggtccttagagccgtgggggacctcaggttccatacagggggaggcaggagaggaagccgcccctgggctggcggggaggaaaaggcttccagggtccagagcatcactccctggagggctcccttccttcctcccgcagtaatgaccggcgctgggcttcaggctgccgcggagggggatggtgctggatgccatggttacatcgatctttcctgccacatcctcccccagctccagccctgacttggctccaagtcgccccacagggggcagtgggcattgctccctgcctggctacttgtggttggggcaggggcgggggtgggggttgtgtgtggacttgggggaggaggcgggagtgaggggaggaggctactcagtgcctgcagttcctgcttcccaagtcctagacccctgcttcttgcctgcccccctccacatttttcctctgttgccctctagggctgtggcacttcagaggcctcttcccaggagggtcccagggcggggagggcaggcctgggggctcccccgccagcgttctcctagtcatttccccttgttctgggctctcatttctctccctgctccgtgatgatgcttcaggccctgacctctgctcctctaaccctgcaccatgggtgtcttcatctgggtctctcgctgggtttaggggtctccaggaacccccagcactgaacacacaattgtgtgtgtgttcatgctaggagcacagtgtgggcatttttctgggatgaacatccccaaagggtcaagccccctgctcttcctcttccctgagccatctcacttgcctcacagccgaggctgccacctgtgggctggtgaccttcagtctatttcactggccagtctatttcactggtggcacccaccctaggagcaccacctgaaggcccctttcttggcctctccaggatctgccttggccccacaacatgtttcttctgggttcccagttttggttaacagctctgccatctccttttcttttcttttcttttttgagacagagtctcgctctgttgcccaggctggagagcagtggtgtgatctcagctcactgcaacctctgccttccaggttcaagcgattcccctgcctcagcctcccaagtagctgggactacaggtgtgtgccaccacacccagagagttttttgtatttttagtagagatggggtttcaccatgttggccaggctggtctcaaactgctgacctcaagtgatctgcccactttggcctcccaaagtgctgggttacaagcgtgagccaccgtgcctggcctgccatctccatttctgaccaggctggtggcctgagtacatcatcctgagtcccttccttccccacctcccccttcttctgtcacccaagcctgctgggtctcccttcccagtatctcttggtctgtttctgctattccctagctcttctccagaaccccttactggtttgtttacctgactggtctcccggttattttaatagagctgaacctggatcatggtatttctttgctcgaaacactccagtgggtctcatgttgtacagaataaagctttactgctttagcaaggcattcagagcctttcaaatcccagttgctgtctgcatcccctcctgtcctccctctccctaagtccttccctgcaggcacgcaccatctggggcaggtggtctgcttttgtgtctctgtgtctgtgtttacagtgtttcttccacagggaatgcccattctgtgaattccctttgattcttaaggtgcagctcagtgatcctctcagattccgccaggcaggttttgcctacctagccgtcttgtaactcttttgtcacaagtctgttgtagcacttatcacatcctgccaccattgggtactcatcgtctcacccattatatctggatttctttaagggcagactgtattttacacagatttgtaccctctgtgtggcctaccatagtgtctgacacatagtgagtgctccatcaatatctgtgcaataattaaatgaatgaactgtgacagaagcaactaccacaggggcttcagaagctaaagaaggcccagcgcggtggctcacacctgtaatcccagcactttgggaggccatagcaggaggattgctcgagcccaggagtttgagaccagcctgggcaacatcatgagacgtcatctctaataaaaataaaaaattagccaggcatggtggcacatgcctgtggtcccaggtacttgagaggctgaggcaggaggatcccttgagcccagaaggttgaagctgcagtgagttgtgatcatgccactgtactccagcctgggcgacagcaagaccctgtctcaaaaaaaacacccagaggctaaagagtcaccttgtcttctctcgacttgttccctcacctattcatggctctcttcctactgtataaagcttgagaagaggccatccatcagatgccagggcggctcagagcttgttttgtgctcatgtgggtatgcatataacaggtgtctggccagtgaggtgagagagcttacacagggatgtcagcttcacagactggcaatcacttccgtaaagtctgtgtctcctaggggcatgtgctgagcttggcaaagcacgcagccccagactgcaggttgggaaggcctactctcagggaggtggctttgctgggttcaggtcagagcctctgggagagtaggattggatattggaccagggcagggtgtgggaacagagctggggtcagagtggttctcccagggccttcaagggctgggccaggccctggttggcccagtgccacctccatgcggatcagcagcccagggcgatgcacaggatgccagatccaggtagggcccatgatcatctgtccctaccccctcagatgaggacccagaggcccagagagggaaaggaacttgtcacggcaagtcagaggtcaggctgggacagagcaaggagccagcatcccggtaccacactgatagttgatcagaggccagctgtgtccacatgtttggggctatttgcagttgggtttctctgggcaggcagccgctagcctcactgcatacccacaggctctctatggggggagggctgggctatagttgctagggatctgtgctcaccttgctgaggctggagccagatgaccagcccccttcagcccatgccagtggaaacctgccctttggccctcctgagttcctgaggggctggccgagattatggtagcaagtgaccatgaaggctcttgggacgcaggctagactcccagcaggcaggcccactccagcaacttttgtcacccactatgcagggaagttcaagctcctggaacaggcccgggatgtgcgggagccagtgaggtacttcagcagcgtggaggaggtggccagtgtcttccctgaccgcatcttcgtgatggaagccatcaccttcagcgtcaaggtcagtcactccctcaccaggtgtggtgtccccacactactccttgcctcaggggcaaccctgactctggttggaaggttgccctcaggatccaagaaggagagcggctcctggggaccccttaggggtctttggcacaatcaagccatgtcagaagggtggggaataggacccactgggctgaaggacttcctatgaaaggtagtgaagcaggagcgggtgtctggaagggtcatgttctgacttggagacttttcagggcaacctgtccctagctgccccagcacccacttgtagaggcggtggttgtggtgagcaggcagtgtaaatagacccctgctgtggggtgggagcagtggctcatgcctgtaatcccaacactttgggaggctgaggagggaggatcaactgaggccaggagtttgagaccagcctgggcaacatggagagaccctgtctctacaaaaaatgttaaaaaattagctgggcatagtggtgcgtatctatagtcctagctacttgggaggctgaggcgggaggactgttgccaggagtttgaggctgcactgagctgtgaatgtgccactgccctccagcctgggagacagagcaagaccctgtctcaaacaaacaaacaaacaaacaaaaacaactaaaagcagtccctgctatgtacagatagtgctgttctgtttacaaacccttttcttatccatcaattcatttctcttcacttagccttgttggatgggtagggcattatgatcgcccaaatggtaaagacaatgatgataaaagtcgccatttactgcatactttaaaatatgttgctgatccaagtagtggggaagaaaagaaaaatatgtcactgcacagtctttttaatcctacagcagttcttcgaagtaagagttatcagatatggtcgctaaggcgtggaggggcaactcatttaaggtggcacagctgctagtggtctctccaggatgaacgtggatctcctggcctaccatctagtccgagccccgggagggcggaagaggaaggctgttttccctttccagtctctgggagctggccgtgtggctttccctgggacctggctaaggccctgccctgtctctgggatccccaggtggtgtcgggcgagttcagcgaggacagcgaggtgtacaacttcacgctgcatgcgggcgacgagctcactcttatgggccaggcggagatcctgtgcgccaagaccaccaaggagcgctcgcgcttcaccaccctcctgcgaaagctgggccgggccggggcgctggccggggtgggcggcggcggcccagcgagcgcgggggccgcgggaggcactggcggcgggggcgccaggccggtcaaaggcaagatgccctgcctcatctgcatgaaccaccgcaccaacgaaagcctgagcctgccctttcagtgccagggccgcttcagcactcgcagcccgctggagctgcagatgcaagagggcgagcacacggtgcgcgccatcatcgagcgcgtgaggctgccggtgaacgtgctggtgcccagccggccgccgcgcaacccctacgacctgcacccggtgcgggagggtcattgctacaagctggttagcatcatctccaagacggtggtgctggggctggcgctgcgccgcgagggcccggcgccgctgcacttcctgctgctcacggacacgccgcgcttcgcgctgccgcagggcctgctggccggggacccgcgcgtcgagcgcctggtgcgcgacagcgcctcctactgccgcgagcgcttcgaccccgacgagtactccacggccgtgcgcgaggcgccagcggagctcgccgaagactgcgccagcccgcgccgcgcgcgcctctgcctgcccgcgccgcgcgcccccgggctcgcccgcgcccccggcccgctagcgccggctcccgccggcgagggcgaccaggagtacgtgagccccgactgggcagccgcgcccgagcccgccgcgccgcccgccgagatcccctacgaggagttgtgggcgcaccaggggcccgagggcctcgtccggccgcccccagggctcgatctcatctccttcggggccgcgggaccgccgcgtcgggagccggaagcgccgccgcctccagtccctcccaaatccgaggcggtgagtgagcgcgctgggggccgagtcccgggtccagccagggcccaaagcccgttctcctgggccccggccccggagtatgtggcagacgaggtgtcttcctcggcggggtggggaaggggagaaggaaagggcagaggcatgccaggcaaaagcatttgtagtaaggggcactggggcgggcggtggcgggagagctgtgggacagagatgcgtgtaggtccccagcctcagaggatttgagaggagccccgaagcactgttacccagaaggtaccacagaacaggggtcctttaagttgttgcgtgaaaagaaggttccttggcgaagtaagcttagaaatgctgtgaatgattcccagccctttttccctcctcatattggagtcacagagcattggtagattaaaggctctgagaagtcctgcactaaggaatcctgtttatcagaacattttctccctgcccgtaacacccgtcagcatcccatggagtcctctttggggtacacgacttgtagggagggatgcaggtggcagacgcttccttccctctgtcccttcggctttcctttgtcctctgctttctctccttttccttgaggagggagcacgtctgcttaacctgttttgatctacctttgtgttctttttcttaacatccatgatggatttccaaggaacaggaaggaggctgtgggacagggtgtgggtgcgtgagataggctgggaaggctaggaagggtggggtggctggctgactggatgagcagttggggtgcaaggcagcctattggcaaagtggggcaaatgtcaggcccagacagccccctcgcccagctgcttgggaaggggaagataaggagtgccagctgtttggagtcgaggtggagtcaccgccctctgcttgtaggtgaaggaggagtgccgcctgctcaatgcccctccagtgcctccccggggtggcaatggcagcggccggctctccagcagccccccggttccccctcgcttccccaagctgcagccggtacattcccccagctccagcctctcctactactcctctggcctccaggatgggtgagtccctgccttcccttggtcctgagttctaaggtagatcaaggcagggaagggtgaggagggggaactacagtgctgaggaagaggaagtcttgaggcctgggagattcccgagggtgcagctccctgtgcagtggctcagggattggcactgctgtctgggtgtcttggggcctggggcccagtggcctgttctgcccacttcagcttctttctctcttaaatgttgaggaacggatgggagcattgccctggtcccctcaaggtggggactttgctgcaggatagagagaagagagctccttgctgttttgaaattttgattaagttcaggccaggtgcggtggctgatgccggtaatcccagcactttgggaggccgagttgggtgaatcacttgaggtcaggagttcaagaccagcctggctaacatggcgaaactccatgtcttctaaaatacaaaaattagccgggcattacggcacatgcctgtaatcccagctactcgggaagctgaggcaggagaatcgcttgaacccgggaggtggaggttgcagtgagccaagattgcaccactgcactccagcctgggcaacagagcgagaacaccatctcaaaagaaaaaaaattgaaagaaaatatttttattaatttcagtttcgtttcatttttcccctgtgttttctgacctgggctgggggatgctggaaggaagaacacggccattccggagggtcttgggctggggctggggtgcaggcccgtgttgctgaggtcatagtggtgcttggttgcaatgcatgtgtgaccctatcggattccctctcagcctcacctgtcctatgtgtgtgtgtctgtctctgtccacagggcgggttcccgcagtggcagtggctccccatcgccggacacctactccctctattgctacccatgcacctggggagactgcaaggtgggcgagtcctctagccgcccagcccccggtcccctaccctcaaccacacagcccagccaggcctcccgggccctcacagagcctctgagcggtcgagccgcctcccttctgggggctgacacccctgttaagacctaccacagctgccctcctctattcaagccctcacatccccagaagcgctttgctccgtttggagctctcaaccctttttccgggcctgcctacccctcaggcccttcagcggccttgtcttctgggcccagaaccacctcgggtcctgtggctacctctggccctgcgtattccccaggcccagcctcgccaggccaggcctattcagctgctcccccctcctcctgcgccccctcctcctcctcttcttctgaatggcaggaaccagtcctggagcccttcgatccctttgagctggggcagggcagttctccagagcctgagctgctgcgttctcaggagcccagagcagtggggacacctgggcctggaccccgcctttcaccacttggcccctccaaggcctttgagcctgaaggtttggtgctgcaccaggtccccaccccactgtcaccagctgctctgcagggacccgaggcgggaggagcactttttctaacccaagggcgcctggaagggcctcctgccagtccccgggatggagccacaggctttggagtccgagatgcctcctcctggcagccccctgctgacctgtctgcactctccctggaggaggtctctcgcagtctgcgtttcatcgggctctcagaggatgtggtgagcttctttgcccgagaacgcatcgatggtagcatctttgtgcagctcagtgaggacatcctggcagatgacttccacctcaccaagctgcaggtcaagaagatcatgcagttcatcaaaggctggaggcccaagatctgaactgcccagctggagctgcacagctggaatgctggtatgggggccccaggtacagcactccggaggagcaggtgctgcctgcaagaaggatctatgtcgagactgaggctgctcagcagccactgggtggatccaggggagatgcatgtggaaatgtggtcctctggggtcagacccctgcacgggacatcttgcctttgagtgtgcagagtacatggggaaggggctgggggcaccactgtgtacctgggcccagtaaggcatttgccgtgattcccacaacggggtcaaaagctggccttcagggtgacctaacaccacctcatgccctgctatagaccttcacaaacgacttccactgctgaagcctgtaggctctgtttagagacaagaagatggctggtaatttaagcaccgatttcccaagtgcccactctcctttgtgctctgttggcttttggcctaaagctgccccagagtgagggtgtagatgtctgtgtctgtgagatgcctttcccttccccctctgctccaccgtggttgaggggggtggggcctggccccgcacacaggtgagtcgtgtacaagcctaacccatggcacctcagaggctccacctgtgggtcctggttcatgggtgacaactttggaagagcacagctctgcaattgacccgacccacttatctagttaggaagccagacactgcccagatgactctagcaccctggcttctgctctgactttactgcagctagtcatccatccgtcaggtggcgttcagtctcagaatactgattccgtggaagagcaggttgatttaggtcagcttctccttgattctagaagcaagcggtagtcaaccacctccaattccgccaatctcttgcccccatcatttgtctctgacaatacttggtgtttttccctggttttctgtcactggcacaggagggtacagttgggagagtgcgttcctggagctcagtcctgcatttgttcacgtgcctcacagcaggcctttgtgcccttgaatctcaaacatggggatctgcttggtacccagagctctggtcattgtgtccaaccacacaccccaccccatccgtgtcctccatctcacccagaaccacagggtgcccactagtgtcagggcccaaagtgccagccttctcttctgccttacctagtctacctatttatttcctccactttttatcttaaaagtagctaagccatgctggtgcccatactccaagcaggctgcctcagctcagagaagtggtcagagagtagagcacagaacctgtgatgtggggacatttggttttcttgcagatcatttaatgaatcctcaaggactaatgaaataaatgctagactgctgaagatgagtacaagtggcattctgggtgccagctgctttcttcttttgaaaacaaggccatggggacccatgggcacagtgtatatgccttctggcaggagaggactgatggaggaatgatgtgggtgtgtggccattcccatgtctgtggaggcggctggtggcagccttcattcccttctgcagggccctcgccagcccctccctacccttcaagaacccccaccccagcttccactagtttcaacataattcacacctacctggtgttactgaagggaaagacccaggctcaaagctgaatgccaccagccagggcccaagcttagcttcctgcattggcagaatgccggcttcaggctctctcagaccaaatttggaaaccggttaatggctttggtgcaagggatcagctccctactctggtcatctgaaaacctcaactcagaggtgacttggttttagagtctggcttcctagtgaccaagcagagccagacctgatctccttgcctgccagtcccagctacagagctgggaccagggacatatttgaagtacaactggagcagaggcaggagtaactggtaatatctgacaatttagaatgcagaatgtgatgggactggaattacgattccgcacacactcagcgtggatccttctgccagacccagttagccccagtgctgtttacccagactgggcactgcttctgtaggaactttccatcccagggggtggggtggggaggggctgaagctttgggggagtgcaggtgctgtgggggtcagcactcctcatgctgctcccgtgctgcctgattaccgcacaggcatttctggggcagccctgctatgcaggatctccgaacatcaagggagatgtcagcgcctctgcttagcaccaacgttcccacaaccatcccaagaagcacctatgaatgaggcacacccagaaaagaaatgggtaagatcacacaatgaggaaatccaggctggggaaagaggtttaatatcccggtacaccgtggtgagaagcctgggcaaagcatctgcacagacaggtgtgtgtggttgagcccaccaggtcccactttctctcatcccagtccctccctaaggtgctgcctagaattctgcacacacattcttactcccccaaagcacagggctttcttccagattgctttttgaaggaggcgtttaaaccagaagggcaaagatgctgacacagagtttggtttttattgttatgtgtttggctgggtgcagaactgccctcaccacccctggccaccctggcctcttgggaggaacaggcagagaggtggcttcagatggctcttggctgccactctaggcctcggggcttatacaatgagcagtgggctctaccttccaacaggaagtgcaaactaattcgaagtcacacttcaccaggagggagagatggtcttggctgaaggcactttaatcagggagcaaacccagtgccggagtttgtcttctcgttactct

SEQ ID NO: 219 - DNA, 290942 bp, Homo sapiens
  source 1..290942: mol_type = genomic DNA
tcttgactctaccttcaaggtacatccagaaccagaccgttcttcccgcctcccttgcacctgccttgtgcaggcagcatcaccgctgcctcctaacagctcttcctgcttctgctcttgtccccttacagccccgcagtgagccccatggccatgaaatcaggtcatgcactatggctgcccacttctcccagtccaagccaaaagcctgcagcaggcagcactggccctcatcccaccatttctcgcaagtggcctctggcacctccaagaacggatgaaagggggcggatgccttttgtctctctgctaagtcatcagaggtaaaatcaccaccaatcccaagaacctgggggaaacgctgagacgggtcgttcaaagaatgtgacagccctccaggaaagagggttgcccagcgtcctcatcttctcttccctcctcactccctccactccagccaggctggcctcagacacgcgagcatctcttccgcttggaacactctcctctggtgaccttccagggtccctcccaggtctccttgtctttgatcaaataccaccttctcaatgaggccactcaaatgaccctattgaatcctgcaacgtaccctgtcctggttttcttttccacaacacttaacaccatccacacccacatcacagaacatagtaggtctactgtttttgtctgctagaatgtaagctacctgagagcagggctctgtttctcacactgatgtgttcccagaacctagagcagtgtctggcatataccagatgctcagtaattattgaatgaatagatggatgggaccgggcgtagtgactcatgcctgtaatcccaacactttgggaggccgaagaggacggatcacctaaggtcagaagttcgagaccagcctggccaacgtggcaaaaccctgtctctactaaaaatacaaaaattagccagttgaggtggggcgtgcctgtagtcccagctactcgggaggctgacacaggagaatcgcttgaacctgggaggtagacgttgcagtgagctgagactgtgccactgcactccagcctgggcgacagagcgagactctctctctctctctctctatatatatatatataaatgaacggatggatggatggatgagaaaagaaacagccaggagctccagagatgagagggaggcaaagggctggaacccacagagacaggaagtcaccagggggaggggcctgaggccaggagcatagcatccatttgggtgccagtgtccagatgccctttgtctcccgctaagtcatcggaggtgaaatcaccaccaatctcgagagcctaggagggatgccaagacaggtcacatgaagaatgtggcagccctccaggaaagagggtcgcctagggggacctagtgtctctggacagtttattttacatgggatgaatctaggcatctcgaggatacacacagagcagaagaaaaaaaaaacgagatgggatttaacttcctgaaaactctttataataatgcaggacaactgtatatagcaaacgccttcaaaatttaaactctttaaacatttaattcttcagcattaatacacacaaatgcggtaacaggggtcaggggggtggtgcgggggcaggtgggttacagcctccactgggatcagggtttcaacagtgttacttataaattatattacatcaattttatttactgatctaggcagccagagggtggaaggatatacaatgtggaggaaacacattcataccggggtgaggagtgctggcgggagacacggctctttaacatgaaaaatgtataaagtatttagcaaaagttacagaaaacagatcaaacaagcaagtttattttgttagaaaattccactttcatagggtttgccgatgtgctcgtgtctgtgaaggggttgcttccggtcatctccttcctaacggaagggaagggatgctaagttggggcccctgtcactaaggatggctggcgtccctttgaatgtctgtccctgggtccacacagctgcctggaacccacgactcccgagagcccgtctgctgcaggtgatgctggaagggaagcgcccccacttgacagatgagtgcacggaggtcccgacaggggatgtgacttaacttcaggttatgggacaaaggaggccgcagagcagggccagtcctgtgctctccccctgcatagcaggctttccctctaggtctcccagtcaccccaccccgagagagcacccacgtgccctgaccttacattccactgcaatcccactaaagtttccctcaaacaccaaggaacagtcctgaacaccacacgcaatctccaaaggccatcgccccaacctcaccccacccccagagacacctcccaggaagccctcctgacagccatgccccagcatttagaacgtggggagaagcgaattggtttttgccctctgtctgattctcgctctaacctgctgcaatgggaattgcttcttcacctccaggaaagcctcaacaaaaatactcctgagggggagacaagagtcctccccggcaaatttcaacccagcagagtcctggcagcctcttcggctccctaccttgaggccccgggggctcaggcttcctggccctaatcttcacctggcctggatccagaaatgtctctggttcgcatagagaggtacccaactggtctcgggactcacctttcactgagcagggggcatgaacaagacacagcttagtggagtgtttacctcaggggtcacactcagcctggtctggccttaactgggtgtggtcctgtccctgccaccatgtaccaccatccagtggggtgcaggtacaggccaggctgtgtgatcaccagctaggcaaggctccagctgcgacaaggactccatcttcacgcctgtcctggctcctggggagtagactccagaacatactatcaaagatcgacgaatgagatccaaacggtcattacttgcactgtctttggggggtcctaggagaaactacctcattcttaacagctcataaaactcttaattttagctccatttgaatctaaatggaaaagtaccacggcatctctctcaccaggacttgaggcaattctatgcacgattgtgcagatgagagccagacacagcatgaacacgtgtacagggtacatcattggaaatgagaaagggaggaggtacatgcagttgccggtggcctgagacactcatctagaacaaacaccctcagcttgcagatgaagcaacagatccaggaaagcatcatgatgagccccagggccagccccagccttcttgtccatgctgcttctgctcgcctttcaaagcctccaacgcccaatacatagccaaggaccgtgtgacactgaagcctgggtcccagaagggagcagatctgctggctgagatgcaagcttcaggttgcagcagacgtgagcagcaattgagcacccatccgtcccttcccctcccatccctggattctttctgcactaccaaaaacccaccacgcgccaaaaggcgagtgtgagccctaagaacagcttgtgggcacagctggcatttggaggaggagcctggggaactgaaggaagcagcaagctggaagtggtcgtgcaaacaagttgaagaccctgggccaagaacttccagggcgaaaggctcagtgtaaaaataaagaagcagagtagtacgcccatgcaatgaaatacttcccggcaaggagaaggaacaaaccacacgcacacatcatgaatgactcaaaagcattaagctgagggaaagatgccagactcaaaaggcgacatcagtgtgactccatttatatgacattctagaaaaggcaaaattataggatcagataatcaatcagggttgccagggaaagagggcaggagaagggaattttttggagggttaaaaacaggttgatcttggtgatggtcacaagacactaaatttgtcaaaattcacagagctgtatatttccaaagggtgaattttactggatgtcaatcatacctcaataaacctgggaaaaggtggtggcgatgggccttgtagggatggcaaggattatggggataagacgatgtccaggctacgtgggggggcagctgatctgtaccccacttaacattagaagtgctctctccgacctacacaaggaatgcatcttgagccttctgtttaaacactccttgtcaagactacctgcagctggaagtaaaatcacctaaacaagccaaggtcgctgatgtccttcgaatgttatggcttgtatttccaaaagggactttggctcagcccagatttttctgcatccatccactcatctagtaattgattggttttcacaaagggtagggaaagaaacccctggttggtgaattcgttggtacactgtttcggtgtgcccagctgtttatcaatcctgactagcagagcactgcctcccaccgcagaaattctccttggccaacagggtgctgagtggaggtagaaaggaggcccagggtggtcccactgacagaatctcagggccgccatccccacggtccaaggggcctatgtgttgccactgactgaaagcactagaaagaatagagggtaacaagtggctcttcctggaggttgtcacagcaaccaacttggaacaccatttggcttaaggaattttttttttctttttaaatcaggctttcacaaacagatcttgtgcatcagtctcctgggtggaggcaggtagaaggggctgacttgttctcagaaatggaagggacattctcaagaatagcccagacccgcccactttgaataaacccagctaagtcctcacctaagcaccaagacataaaacaaaacaacaacccggatagcgtgcttgcctctccaaagtgcagtcttttattttctcagttgcatcctaaccttgatttcaaccagaaacgggcccctgttcatacggataggggttctggactgttgactctagccctggtcttaattcactggcaatttcatagcctcactggttacccttgagcttcactttcctatttgcaaagagttatttataatttttttgagatggagtcttgctctgtcacccaagctggagtgcagtggcccgatcttggttcactgcaatctccgcctcccaggttcaagcgattctactgcctcagcctgccgaatagttgggactacaggtgtgcaccaccacatctggctaattttttgtatttttagcagagacggggtttcaccatgttagccaggatggtctcgatctcctgacctcgtgatctgcccacctcggcctcccaaagagctgggattacaggcgtgagccaccgtgcccgacccttatttgtaaagagttatttaaagcaaacagagaaatttctgaaattcgaattggatatgggccgtgagggtctggtgaccaggtgattaaaatcttgttgctgtctaccttccatccaacaggtaaatgcctcacgacggtggtttatattataataaagaatcccagagggttaagtgtggagagggtacaatgttcttattatactcttctcagtcgacatggagaatagaggagagcagaggaatgcccatcttacatacaactagagcgccgcttctcagcatgcctggcttgtcttgagcattcgctgaatgaatgcagattaatcagaacaacagacttacctctgaaaacttaaattctgtagagtgcctatgtatcaatgccaaggttgctgaccggtaagacccctgaaaacgagcgatcacgggcttccctgacgacagggccattatagtgtcctcagattagatcttagcacaatggctttaacctgcttgatgaatgaataacagagggaagaaagaaaggaagtacgtgaagggggtaaagagaaggaggtgaggggatgaggggggaaagagtgacctccaaaaatggactggcccaaactgggccaacctgagctaccctggaagacgcaagagggctcactctatcccagggatgaacagaggactctggaatcctcagatgtaatggaaaagtcaatgagccatattgtactcaaaatatcttgttaataacaaggctattggctttgaatgtttggaaatcatccacagagtagtttactaagccacaaagcaattaccactagcacccatttttcataaagaaaccaagaaataatattctaaaattggtagctggtgtcatgacccaaccccagatctggacagagtggttctccatcccatggacagatcctaccaggaggtcttcacgtaggtgaaggcctttgtgctgacctttttggttgcaatgtttcaagaacaagagaaaagtgacaacgtttggtttactttagtatattaggcatttttctaatgtgaactatacgaaagcaattctcattcaatgaaagaggcgccaaaaaattagagattaataagtcatcggtttctagcacgttgactgaaagaccagtgagttgtgcttgttgaattctgccctcactgcagatgtgcaggtcaaacccaaagtggtcaatgggaaagatgaagaaagatggatttccagggcatgggctcccgactagaatctgcccctcgctcatgcttctcccggcccctttagactctttagactgacatggtggagaatgtgtttgctgtggtagagaaagggagaaagtaatgagctgggccaaacagcagcactgaaagcttcccaagtcacactcagaccagacttttccagggattggaagatggagagagggaaaggaggtgcagacaccaagtaagggtttggtgcagggctctggaatgtccagaaggagcgggaagcaaaggtggcgggacactgcctgaaaggcgacaacctagtgtggccacaagagagtctgctatgcctgtccagtgcccaccagtgacagaaaactgtacaagggacagcagtcccagccctgccatacacaagaagacagagccatctgggggatggcaaagacttgccctaacccatctcacatgtaggactgacccggccccattaagagcctgtggtgggcggcccgggagagtgggggccagggcagcccaaaggtgcacagggcaccgtggcggacaggccccagcttgctggcctctgagacgagctggtttgtttccatccctgaagcctttggacgagctggatgaggtcttgataactgagaactttggaaagcttcctctaatgagactgggaagggctggcagggtgggggcaggggcctccccgaggaagcagctgggggaaggatggattggcatttccagaggagactttacagatggcgcctgatctcatgggacacgattcagcgctcaatttggggctaatttgccgaatgaggtagttccatcctgacctctccaggcatggtgggtctgggaagacaggagccaagccttcctcctaaaacccctggtgatgaacagtggctgagaaagccagatgtggactcccagaatgcaatgggaaaaaaataaagaaggagggctgcaaaggattctgggtgcggctgtgagctgaatggcaccttctacccatgattctgatcctgacacctggcttagagacagagccctccctaccctgatcctccaaagccctggagacaagggagccagctggaggaagagccttggggcttccagggcacaagcatgtgacagtgacccctacaaaactcggcaaggaccacaaagttccagcctctgtttgtttcagagcggcaagcacagcatgggagtcagggggtcttcagcctcagagacaagggcagggctgtgggtctgtcttctgggcctgggaatatgggggagcccccagctaggctgtccgggtcacccttctggaatcaccagctctctcccctctcctcagtggcccaggagagagggtggggggcatccactcggcatgggccccatggtgggagcccagcccccctccccagcaggaccccccgaagctgcacaggcccatctagatctccatgtccacagggcggatgttgcccgtcttgtgctctctgacccacagctccctgtctttggccgggtccacttttcgaagcagctgatccacgggctcgactgtctgcaagagacagagaaaatgcgacactgttagagacggcggccaagccagggaggtctcctctgagacatgctgtcctcaccttagtgtctctgagagcagcctctctagagggctccggggccccagggggaggcccatctgagggacagcacatgaagagggctgtgaacggggaacccagtatgcatcccgaccctgcttctcaccctgcagaccccaggcctggatgagaggccaggagggccttaaaacctgtctctatcccttccaccccacatttaccaccagtgaacaggacaaataaaacttgagctttaggtattgtgaatatttctagaagttgttttttttggttttgttttttaagaaatttaataatgtcttcagctactgtaactgttacgagcttctttctcctcagggtaacagctcacgtgtgtgtccacttcatgtgccagggtcggaatcacacagacgtccaggacaatcctgagaggcccagtccacgaggccacccccaggccagagcacctgcccactgcccgcctttagggcagattcacttgcagcagccacttaacctgccacggcctagcgccaggcggctctccccaggccccgtgtcgcccgggagccccgctgggctggaaactcacgctttggttgaacatgtctgtttcatgccgcagctgcgtgtactggcacaggtgctgccggatcatctctaccctctccacctccagccgctctagctcctgccgagaaagcaaaggccagagaactctgagcacgtcccctccacttgggggtccccccaccaagaccacaaaacgcaagtcactggctgtggacattctgtcccatctgactctctggggtctgatgaagagcgtgccccatatctaaggtgaaggtgaagctgatgacagcagcagcggctgttttacttcctgaaatcctgctccgccacgcacagtgctgagggctttacgtgcgttccttaactgtcctcgttacaattttaagagatcgtttctgttattatccccattctccaagcaagggaactggggaactaacacctagagaggcaacaacacagctcacccaaagcgacacggaattatgggaggaacaggatttaaaccagagtccatcaggctgttactcatggcaatgcacccatgcagccctggccctggtgccctgatggggtataacaagggggcacatgtgggagctccatgccacacattcctgggaccttgtccctgggcctctgctgagcagcctcccttcctctgcctatgcctagtgctgtggccgcaatagagaccgggccagggaggcagactgggctgcacgtggcacagcttttgtcaaaggggagcgtggaaagggtttgtcctctggtttctagatggttttgtgtctttggaatctaggggatccggctgttactctgcatacaactaggtcactgcccaggtgattaatcagaaaggggggtaaagcagggggcttaattaggagattaaccaggaggaaaactaggtcactgtccctggtggaggcctctaatctgctctggtgggctgacacctggggaaggcagctggttagtcctgtgctggatggacaggggtggctttaggcagtgggctgatccgatgagcacctggcatgatgcctcctgtcccatctggcccaagtaccagccacacttcactgtccactcaggcaggtgctgactgataaggagatgctgcccctttacaagaaatactcaagagcatcatcggccctgccgcctgttgttcacccttggtgagaggcctcccccaccccactgcctagctccatcctcacccatccatccactttgcaaggatctcctaccaaggacctgcaactcgtgtgtgtgcatgtgtggggcggtcctctcttcctatagcttggctatttttcctaaagaggcccttgtccacttagttgaggagagtcctcagttgaccctgacctctcaggggacagcccaagaaggatgtagccatatccaacccaaccctgcccacatccacacagctaggaagcgctggagcagagatctgaatccacataagctggctcacattgaggtttcgaccccaacactgaagtagatttgatgaccatctccagggtcactccaccccatcatccccgcgcccaccaacaaccaccaggggctgctctgtgtcagcctctgtactgccatgtccacacatccctgcccgcttaccaatgtggtggtcaccatctcttcaaaccatttggactgggcctggttgtagagatccacacagcgcatgaggtcgtctcctggaaaaagaccacagtcaccatcatgaagcatcctatcctcaccatgactctgtgccccaccctgagccccacagccaagccttctcctccccctggggtcatggtggccgctggaaagctggaaaagggatggcagtaggaagaagaagaaagcagagccagggaaggaagggggcaacccagccccatgagaacccagctcaggtgtccccctgaagcctgaccccagataccaaggattcaggatggtggttctcattttgtgtgtgtgtgtgtgtgtgtgtgtgtgtgtgtgtgtgtgtgtgtgtctagggtattcctaggacccccaatcctatcatgagcccaagaaatgcttccctctctaaagatggcagttttattttacactggggagtccagattggttaaaacatgtcacacacaatttggtgctaagaataattaaggaagataaatttgcagatcatgtaagtgtgtgtgtgtgtgtgtgtgcatgaacacactgcaagatgtccttctgaaacacaaaagaacgcatctgtagtcacagtctaaaacatgcactggaggagcacaccccagcttcaggagagtggctaccttgggaaacagagaaagggtgagtgggcaggaatcagctccttctattgcattttatgtcatcacagaaagatccgaggcaaacataactattcaatctttaggactactctattactttgttatcatatgtatgtttagaacattttgtaattagaaagaaaacacactgcgaagtaattgcaaacattactaagcgtaccagcaccttggaaccttgctacacaaatcacagtctgtgggccagtggcacttgtatgccctggggtcggctagaaattcagaaacccaggacagatccgagacctactgaatcagagactgcatgtttatgagacgctctggtaatgtgtgtgcacgtggcaggcagagcagcacagctctcatgcacggctttgtctcagcgtagcttcctcatcctcacagggctccagcaagaggaaggcatcatggtgtttgctcacgatggaaaaagctcatgagtgaaccccaaagtgaagtaattttctctagtaattctagaagcagaatgctagagtagaatttagtaattcgagtagagtcaaagtgactcctatagtatcatcattgtggctcataggtactctgataggaaagtcaaagagaacagggaaggttatgtctccaggccccaggcctagctgcgaaccatacccctagctatgccacacaccagacgcgagtgtgccttgaataacagagcccacaccaaggcatttattcattttgttcttggtccaaggccaatgactggacccttgatcccaagaggcactgaaccggagagaagaaagtggatgctgcaccgtaaaatgcatttttttctttttttttttttttttgagacggagtctggctctgtcacccaggctggagtgcagtggcgcaatctcggctcactgcaacctccacctcccgggttcaagtgattcttctgcctcagcctcccgagtagctggtaccacaggcatgcgccaccacccctggctagtttttgtatttttagtagagatggggtttcaccatatcggccaggctagtctcgaactcctgaccttgtgatccgcccgcctcagcctccgaaatgcaaatgcatttctagcaagagctcctgcctggccgaggaggagggcggcgtgctgctctgtacactgtgaaactccctgagccctgtgtgtcaatgctgattttgagaaattgcttcaggaacttccacagcattgggaaacagagtaggtgaagggggctgtaccttctctctatggcagcccaagagcttgaaattggaactttttagaacagtattggttaagaccatggattgtgggacaagaatgcctttgttggccaggcgcggtgcctcacgcctgtaatcccagcactttgggaggccgaggcgggtggatcacgaggtcaggacatcgagaccatcctggctaacacggtgaaaccccgtctctactaaaaatataaaaaattagccaggcgtggtggcaggcgcctgtagtcccagctactcgggaggctgaggcaggagaatggcatgaaccagggaggcggagcttgcagtgagcagagatcgcaccactgcactccagcctgggcgacagagcaagactccatctcaaaaaaaaaaaaaaaaaagcctttgttgtcatcccagctcaactacttattagctatgtaatcgtagacaagtcggttatcctgcgcttgcctccgtgtcttcatctgtaaaatggagataacgattgtacctttaccaagttgttatgaggaataaatatgtcaaaatatgtaaagcacttagaatagagatgggcgtagagagccaaatattaatatgggctatggtggtgatgaagatgatgatgatgatgatgatgatgatgatgatccctgaggatctgatgtctttccttctagtagccttggaaaagatgaggaagagggaggaaaggaacagaaggaaagaacaggtggcatttcctgagcaacaggctgtccagcaaaatggcgacaagcagagtctctggaatgagaggagactgaattgtggcttcgccgctccaccactgtggacctcatggaaggttctcattttctctgccatcagtcttctcatttgtaaagggtataaaaatacctccctgcagggggactgtgctgatcaaaagagacaatgctctaaagcatggaggctggccacagcgagtgctcagaagaggcggtatttttcagagttaggtctaaggactgtcactttcgtcacaaaataattccaaactacaggaatgagagaccgtattatctgatgacaatgcaataaaactatgtaaaaaaaaatagcaagattagaaaacaacaacaaagcccttgcttgtaaacatataaagattttctttgaaacaattcttggttcgaagatcaaatgaaaacccaaatagcaaaacataatgaaaatagcagaaataaaaccaccacaaataagaacctgtggaatatggttagaccaccagtgtaaggaaaaataaatgtctggtgggttacatatttcactgtctttttttgtttgtttgtttgttttgttttttgagacagagtctcactctcttgcccaggctggagtgcagtgctgcgatctcagctcactgcaacctctgccttctgggttcaagcgattctcctgctttggcctcccaagtagcttggattacaggcacacaccaccacacccagctaagttttgtatttttagtagagacgaggtttcactatgttggccaggctggtcttgaactcctgacctcgtgatctgcccgcctgggcctcccaaagtgctgggattacaggcgtgagccaccacggccggccttcactattttaaaaacaaaaacaaaaataaacacctgaaacaaaaaaaaaaagtaagaaaaaaccctctaggtgattaaaaaaaaagatctaaatcagctccgaaatctaggcttcttatgggaaatatcactgtacagaaaaacagcaagaaaaaatagacaaacaagcaaaaaaaaaaaattacaaagaacaaaactaaaagacaaatgacaatctaggaaaaatatctgcaattaaaatgaaaaacgattcatctccctgatagataaagaatctatggtcagtggggaaaggatatgagttaatcagttcacagaaagtacaacaatgatttatatgtatattttacatactcaacctgggttatggagaaaagcaaattaaaaacaaaatatcatttttccccactcactaccaatttcaaatcttgataacacacaatgttgataagcatttagagaacaggcattattcatagatgctgttgataggtgctctctctggaaagcaatttggaaatatccatcaagacgaataataccctttgactcagcaactatattctctctatatgcagatctggtcttaggcacacacaaagatgcaggtacaataacacagcttcactggctggcaagcactctgaaacaatctaagagtcctaaacctcagttaagggaatgatgaaacaaatttgggtacaatcatacaactggacactggccagccattaaaaagtttgatatgcatgaatggatgggcaaaaagatttacagaaatgaaaaagaggtatttccaagatatattaaataagttcagaagatagattgtatgatcaaatgtatataaatttaaatatttaaaaatcaaaacactaggaagagatggtgattatttctgtgaatagcattttatattcttgtctgctgattaaaatattttgccatgtaccaatactgtttttgcaatataattgttttttgaggtagagtctctctctgtcacccaggctggaatgcaatggtgtgatcatagttcaccgcagccttaacctcctgggttcaagccatcctccaccttagcctcctgagtagctgattctacaggcatgcaccaccatgcctagctaattttttcaaatttttttgtagagatgaggtactatgttgcccaggctggtctcgaactcctgggctcaactgatcctcctgcctcagcctctcagactgccggattacaggtgttagccactgcacctggcctataagttatttttttaataacttaataatttaaacagatctcttccccttctgtgcccccccttctctctaccaataaatatactgtgccctctacttcttgatcctgtaatttattattgtgcattataagatttgtataataaacgttatccttctattacattattttttattgacttatttctatcttaccttattttgaaatgtaaggtggctgctttcttctataatgaaggaattgtaacaggttcaccagaaattgaggtgaaagggacctacagaccaaactctaatactacggcacacattctaattccagaggcaacatgcgtgtcctctcgtgcagtgaaacgtggcttcccttagatctagttaccgaggttttcactggttctaccaggccttctcttcctctttgtgtattagctaactttgaccactaggtggaagcagaaaccaactcattgggagactattcccaagagactgaaatctggttatttctttaaacaaagtgtcagcctctgttcccagggcaggagcccatccccataggtgaaccttcagagagagcattgcttcctggggaagtgggcagcttgggtgagctgtgtgcttctgtgggctctgaacagggacagggccctgagctctcagtgcatgaaggagtttgtccacctcctggtcagagatctggggcttgggcggaaaacaaaaaaagccacgaccagggagagagtaaggagtccagcctctaccatgccccagaactagcccggcctgtgtccttcctctgacccccaaagtctctttctttgagatctctgggtgtgggtcagagagaagggaagagggggtacctcctggcaaacaagggaagtaatttcctcgctgcagtcttgcaaaggagagatgcaccctcgccagtcacctcatctcctagccccgtgccctctccttctgtgtgcactgaccaggccaggcgggtgcccagcacttaccagcctgtgtggactttctccgcgccttcttgatgtcctcctctgtcttgttgctcagcttgatctccagctgctgggtcttcatctccaggtctctctgccgctctgtgagggctttccgggcctggggtccaaggacacggagaagctgctcatacagctcggagccagtgggcctcctgggccacgcagcccagcttccctttggagtcctttcgccccttgtttgtgtggatgatgccacagtggtccagagaggcccagcagccagagtggcaccacccagctaggtagaggctacaacccaactcttttcgtccttgcctcttccagtgacatctggactcagcctacctcaatctctcaaaccacgtttttttcccgatggagcctgtacaaagactggggacctaggcagtcctaaagtcacagcccctctgcttggaagggaccacaaaggccatctgtgtcacctccctgcagcacttaataggatgtagcaacagccctcccgttctggagctggacaagcctcggccctcttgttcccctcactgtactgcctttcctccaggccaccactggcatctctgtggtccttgggtggcggcagttggctgggcccagggtgtcccagcagtttgagcccccttctcctctctaaggcactggggactgggaatcagtccctggggcacactctcttccctctaaggctgaacatcagttccctggaggtgagaccacccaggactcagcctcatccctgagcaggaaggagagcagggaggcggtgactgagtcaggacgactcagccaggtgaggcttaaacacggggccccacgtgaaccagcagcagcactgctaggctcggggtttaactggtcgccaacagccactcgactgcccactgcagctgcagcctctcctcgcacccctggccctctgggtggtcattccagcaccacagggaggcagctcctatctgcccttggatgggtggggtgctctggcgtaggcacgaggcttggacatccccctattcccctacctggggacaaagactcagccttggcgtatggagccactgctggcttcccagtcccccttcttccaggcagtcccccatgcacctgccctggcccagcgtcctgggcctctcaccttctccaccgaggcatagcggctggcgagctgcttgcgaaggtcggcaatgtggtggtcgcacttcttcatgtctttcttgaagttctcacggaagttcatcaggggcttctccacctcgctgtgaagctgttgggagagtagagacgcacactcaggacccagggcatcagctgtaagccagtgcagggaggagggatgggaggggcacccccacttccccaggcaagtgaggatgagtctggggtagcgacctggcaggaaggtgagagacaccccctgacacgtggctgcctatcaggtctcagcttaggcaggtcaccttagctcaggaggcccccacacacgtctacaggataagtggttagcaactagagccttctgatttccccatctgttaactactttttttctgagcttctgcagcttttaaatttttagaattttttactatttatggtttataatatgctgttttgaaatatgtatatattgtggaatggctaaatcaagttaataatcaatgggctgggcacggtggctcatgcctgtaatcccagcactttgggaggccaaggcaggttgatcacctgaggtcaggagttcgagaccagcctggccaacatggtgaaaccccatctctactacatacacacacacacacacacacacacacacacacacacacacacacaaattagctgggagtggtggcaggtgcctgtaatcccagctactcaggaggctgaggcaggaaatcacttgaacctgggaggttgcagtgagccgagattgtgccactgcacttcagcctgggtgacagagtgagacttggtctcaaaaaaaaaaaacaaaacaaacaaacaaaaaacaataataatcaatgacctcacacacttattttatcccacagcttcttgcacggctttgttcttatgtctctctcccttattttccgaactgagagctttctggggacagaaaccacatcagcgtctgtgtctccaagcactcagcacagtgactggggtacgcggcttcagtaaagaacagtcgaatgaatgccattcaattagaaggtctcaggtcagtcctatttatcgaacatctactccatggcaggtgctgagaatacaaaggtgagctagacagggtccaaacctcgaggaactgatggtgggaactgttggagacctgctggaaactcacaagggcaactgtcccgcattgcgctcataaagacattctcagcttgctgggctgcctggagcacaggcaaagggaaccgccctgtatcccaggggccagagaaaagggtttatgctgtcagaagagctgggtggcatcagggttttaagcttttttcttctcttttattccttccctctttcccatcccacccccctttaaaagaacttttccttaaaatttgttccttttgtttgtgagcataacatttatttattttttatttatttatttatttttttgagacagagtctcgctctgtcgcccaggctggagtgcagcgacgcgatctcggctcactgcaagcctcgccttccaggttcacgccattctcctgtctcagcctcccgagtagctgggactacaggcacctgccaccacgcccggctaattttttttttttttttgtatttttagtagagatggggtttcaccgtgttagtcaggatggtctcgatctcctgacctcgtgatccgcccgcctcggcctcccaaagtgctgggattacaggcgtgagccaccgtgcccagcccataacatttataagaaaacagatcaacgggacctgctgtggtcaaagccaggtggcaccctagccctgtgcacccctcccaccccactgcctggaatcaggcaactctcttcaacctatgaccaccccaccaccgcaaatctgcctccaccggtcttagaggtgtctctagggagcacagctcaacttccctggacagatgatatcccaacgagggttctgtgacttctctcctctccctcaggtttttgctgtacaatatctttttctctggatacaaccaggacttaggtgtccctattctaagcaactgacttacacggggctgggagctccaagcgggcaggggccccatctgggttgagcactgctgtgcccagtgtctgacctgggctggggctgggtgggtgccccttctgtgtttgtagagagaatgacaaactcttcagagctcaatcccctgggtgacaagaagacagctttgtcgctggatgaccgtcacagactaacagagaactggccatccaaacacccctctctcctcctcgtgttagttgtaaatatgtcctactattttttttgagcccctggaaccttccctgtataggaaaacatccccacctggcggcagtttgcaggatgctacaaaaatcttgagagcttacgagaataaataaacccctttcccacgtatataggtttggcatttgctgagtaggagcagctgtacgactccgggaatctgggagagttagctcagcctgctgactcagaaactccggggtctctaaggacatggaaagcaagtgactttcaggctttaatacgcccaggaatgacctgaagagttttcaacattaaggtttcctggaccccagccccaggttctgtggtctggggaaaagcccatgaacctgccaatatgccaggaagctttccccaaattcaaatgacattctggaagcgtgacgctgctaactatcacaagtgatttgattccacagatgaggatgcctggcatctccatctcgctacagacatcaagtattttatttatttatttatttttttgagacggagtctcactctgtctcccaggctggagtgcaatggcgcaatcttggctcactgcaagctccacctcccaggttcaagccgttctcctgcctcagcctcccaagtagctgggattacaggcacccgccaccaaacctggctaatttttttttgtatttttagtagagacggggtttcaccatgttagccaggatggtcttgatctcctgacctcatgatccgcccgcctcggcctcccaaagtgctgggattacaggtgtgagccactgtgcccgacgatattaagtacttttaaaagacagttttttttttcctttaaaatggttaggctggtatctttagtacccattcttaacttttaagcatctctgttgaaccaggaatcagaagtccttcctcaaagtgtcctcacagactcaggccggcctgtcatggcccatcagtttttctttccaaaactctcgctctctttgcttccttttcatctcacacatcagaagagaataagagaagttccaagttggtaggaatttcagacactgtctagtctgatatttttcagacggtgtgcggccgagagttgtgaaatcgatttaatgggccaggaccagctttttggtgagaacagaccagacttgaacagaaaataccagagtacattttaagtaggaggataaatactgttttatgaaacgtttgtttcagctacagatgtgtgtgaatgtctgtgtgcagatatcggagtggatacctacagacaggttctgaatgctcacataaaatgcatcattgtaagtcactgtcagataagtgtaaagagactgatctggtctgaattcttcatttcatatgtgaagaaatgaaaccccaggggagctaagtgacttgctcaaggtcacagagcttgttagtgacaatactgagatacaactcatgtctcctcactcctgtcccctaaatcttctgatggaacgcagagcctctaccgcatgagattttctatcagcagaaggaattctgctcttctcccttcttcagcaggagccaggtataactttctttgtatacggctctctcatttctttagcaatctgttgctattagcaatggcttgagctaatggaccagaaaaaccacaaaaattgctgcaacaaaattgcatttcttaaagagcttttacccctgacacagagcattcagagcagaatttcaataagtcttttggagcagacattaaaaacggtttttggcatatggagctatattattcatggcagtcaaatacatccttggagccactttcttctcaaggaatcgccataaaaccactaggctgctgcgatgaccgcttgaggccaccaacactgaccgacaggctggaagcagccgagagcctctcgtagcaaagtctgttttgcatgacgggtcttcatgagcttcctgtcaactgaatggtgaggtccaccctgtgtcctgaacactaacttaaaatgttctgagcatgtggttgtccagggccagtctgcagtagcccattggcaacccctggaaaggcacaggctcaagaagaggctgtgttttcaatgccattggtctgccaaagcaggggagctgctggaagaaaagctctggggaccaagtctcccattcgctcagtcctttcctttgcttcctctgtgactgaacccacctggctgtgtgaccatgggctgtgatctcaccccacctcttctcactgtgaaatgtgtatgctatctcgcgtggtggttgacggcaatgagttatatcctgcacacagccatccacaccacttatgtcaccactaccacgtcggagagagttttgccacctgttgagcactctaaacaatcaagaatcaggggtcctgctgatggggagtaaatgccaccaagattcccggggacccagcaggtgacctttccaaagctcgcaactctggctcccagccccaccccatcacaatggcagcccgcccaggatcttcccagtcaatggaagtttctaccacagcagagaatggagctgctgggggccccgacaggggaagggaggccttgaggggaaagctactcatgatctgcagctgaaaaataacttgctgttttggatgcaatgcaggaaaaagatccattcacggagttcccttctctgccaggacttgagtagcaattttctactgaagcgcttggtgtaatgaggttagttagcatgccttcactggctgggaattctcactcacatctgggtgtcaactcaatcttggggcacactaagccatggggagctgtagcagctctgttccctcttccaacccagctctttagaaagtcctttcacgtgtctcagtcatctgagtcattcattctgccttctgtgtgccgagtaccaccacggggtacatcgtatgggatcccaaagcagggacttgcaattgcagtaggaacgacactaggaaagagacaggaccagtgagtgctgaacgtggaagtcccaggaaggagcgaccatctctgagggatgctaccttcaaatgatcaagcacgtgtttaaagaagggagactcagcgtttaggcactttaccctgctgtgtctgactagtgatggtgggaggacagagggaagagcgaggaggccagggtcactgggatggtgcactctgaaaggtcccccccgctttttttttttttttttttgagacagagtctcactctgttgccaggctggagtgcagtggcgtgaactcggctcactgcaacttctgcctccagggttcaagagattctcctgcttcagcctcccgagtagctgggactacaggcatgcgccaccaagcccagctaatttttgtatttttagtagagatggggtttcaccatgttggccaggatggtctcgatctcatgatctcatgatccacccacctcagcctctcaaagtgctgggattacaggcgtgagccaccacgcctggcccctttctttaaaaggcaagcctgttaatgggtagccccaccaatcatgtacactttagagtggattacttcactgagagatttagtttatttttcatctaaaaattagctgagagtcggagagaaaacctggaggtatgtgccagggagtggggaagggagagtcacttggaaacatggagaaatcttgagagaaagcagacctgaaaagactgggggtggggtggagatagtcagagggctctgttcattcatgactcaataagaaaatatttattaagcatctactacatgcaagacaccatcctgagccctgaggatgggaataggacagaaacaccctgccctcgagtcctggcactagtatcttcagaattaaatgaaagagggatgctttatggtcgggagtggtggctcacgcctataatcctagcactttgggaggcggaggagggtggatcatgaggtgaggagttcaacaccagcctggccaacacggtgaaaccccatctctactaaaaatacaaaaaattagctgggtgtggtggcaggcgcctgtagtcccagctactcgggaggctgaggcaggagaatcacttgaacccgggaggcggagcttgcagtgagctgagatcgcaccactgcactccagcctgggcgacaaagcaagactctgtctcaaaatcaataaatcaataaatcaatcaataaataaatgaataaataaataaagaaggaccctttacttgttctgaaattttgcaacaaccacaaatttaaaaaaaattctccctttggcataacctaatgttccctgacactaggaagagacaggacatcctactccatccctttgaaagccaggcaaaaagaaagcagggcttcgtcactcaggggctgccctgagaaactgggcaggtgtgctaaggcctgctcccagtggctcccaagagctgaatgttaaattttcaggaattctgtttgctggttgttaaacacggccattatcaaaaaggaaatgatatgaacttataattgaataaaaattatattaaaaacgaaggtaataggccaggtatagtggctcatgtctgtgatcccagcattttgggaggtagaggcaggaagactgcttgaagccaggaggttcaagaccagcctggggaaaatagcgagaccccatctctacaaataaataaaaaaattacccaggcatggttgcatacacctgttgtcccagctacttgggaggctgaggtgggagaatcgtttgagcccaggaggctgaggctgcagtgagctatgatcatgtcactgcactccagcctgggcaacacagtgagaccttgtctttttaaaaataacaaaacataaaaaacaaaggcaataaatacctagcacttaccacctcctaactacactttactattttccatgctcttggtggatattgatggttatttgtgctactgtgtctatacaaaaatgcaccacctcatggtgagccactgggcagatatctcttcccaactccgtattccgtgacttcatgttgatagcctgaagtttacaccagggaaaatggcaaacggcaaactggagagacagttgttaactattttttagtaccccagtgtgtaagaccaactgagggtggctgcagggaggggttaccttggcagagaacttgaggtgaacttctgcttcgtccgccaggctcttcttcacctgggcccacgcctctcccaaggagctgcaacacaaagaccatgagactcaggtcacaagccaaagcccttcctgaggcaggatggtggggctccaccccaggtctcggggaggtatatgacagctgagaatgtggacgcggatgaggcagaagtcaggcagaaaccagacatgagcatcacgtttcaactcacagagtcagatgagccaccaaggtccaagtgagctcaccttacctctggagctaaggaaacagactgtggcgcacagccaagaggtggggggggtggggattcctagaaatccagaggctcgaaaggacccaggaaggtgccggaagcaggtgtggggacattccaaagcctcagctgcagtgagggccttgacccctgggccgtcactgtccccagagctttcacatcacccctccctggtttgctgatgaggggtgcaagcatctgctaataaatcaaggaaggaaaacaggttctattccagggagaagctcttttcatttgtttattagtttgttccttgagacagtcttgctctgtcgcctaggctggagtacaatggcgcgatcttggctcatggcaacctctgcctcctgggttcaagcgattctcctgtctcagcctcccgagtagctgggattacaggcgtgtgccaccacatccggctaatttttatatttttagtagagacggggttttgccatgttggccaggccggtctcgaactcctgaccaactgagagcagctgcagggaggggttacctcggcctcccaaagtactgggattacaggcataagccaccatgcccagccggagaagctcttttcaaacagcaggtatcacacagcgctgcttataggaaaaacccagctccttggcttccaggagtggggaagatggactgtgtgggtctagtgacctagatgcagccacagggcagagaaggctcccacggccatcctaggaagcacggtctcctctagcactgcttctctagctgtgagccctgatgctgcccacagcttactagagaagggccaagtcctcttagcagcatcacttctccactccaaggagaggcttcacgtagaagaaatctcctgaagtccctaagacttgccaatgcaggccccaggctacattctctatgatttggagctctttaaccgcatgacccttccaagtgatacccccgctttcttgctcccagcctcttcaacacagccagtaaatccaggctgaatgttctgttgacttaatatcatccaaaagccacttcccccagagaattcattaaagtcgagtggcaaaagctgaataaaagacagcatgtggtgaggcttctgggtctggagcagagcagccagcagcgaagaattgcccaacagtgcacagcagatccctctgatggctggccagccctgtgtggtggtggcgcaggctcaggccgaggtgggtgtttatgggaaatgactgcctgattttatctaggagtctagcagcaaagaaaggtcccctcagtgatcctggcaggggaagccaccagagaagcactggagtatgaaacggggcaatccaagctgttgacaattgtctctgcctgaagggcctgagatccaggaagctgtactggggcactccaccccctctgggtggcttgggtgccccacctgattcaacaggtgggtaggaggtccaggggtggcaggagtagtcctggcagttacacagatcagcggaacagaacacaaagtcacccagctagggccgattgactgcagcaaagaggttagggtgtttccatgggggaaacagatgatctttttaacaaatggtgcagagacaaccgtacatccacaggaggaaaaggaatctcggccctacctcacaccatacacacaaattatctcaagatgcctcctagctctagggtgaaagccaacactatttgaagcataccaaggttgtcctgggaggaatgggaactggattaaagggaagtgagaggggtttgcccctgcagctgagccacacacagcagcctgtgggaggtatgaacaagagtcacagagccaaaaaggccccaggcggtgcccagactttgtatgagcacatgcatctttccacagagctgtcagtctactgtcagcagagcacatggcaggtaaatggcccagggacagtcgtggtggcctgagaatgtcatctctgggcaactgggatgaaaggaagaaccatggttttcccccacccaacacaacgtcctcagctctacctccaggccagacactgctaagtgggaagacatgtctccagacattcagaggggcccctctgagccagtgcatccttggtgaatgcctccctgctctccaatattccaggctctttggagtcacatcaccatttattaaaaagctacttacaaattctctcatttgaaaagagatttttcatctgataaacggttaatgaaaaacaaaacaaaacctgaggtgcatctctgttccaacatacagtttcaggtacgccaaatcaaaatgcatgttgttttcatgactgccaactaggaaaaccaaaatcgcatttcctttccacataggagagaaaaactaaaggcagaataaacaaccgaattctgtttatttaccaatgtgcacatgtcctgtgaaatctaatttggacacagaagttgaattgcaaaagcctctccagcctccctgagcagcatcttcctcaactgctccaaatttctagactcctgctttgctttgaaagtcttcaaggagatagggttaaatgtccaaagctgtgtgtaaatgtaaatcagtgtctttgcacgttgtacgtagggggctcatgtgttcatgttccagtgcctgctgcaggagtgtgtgcatggggctgctgtgcgtgcatgcacacacagagtaatgtgtacacctacgaggcagtggccctgatgcatgtatgtgagcttgcgttgtgtttgtctctgtgtttgtccgggcatgtgtgtacagtatggtagtgtgggcctgacttatggagctggactgctcgggtgaggagcatatgctgtgcatgttggccaggacacagtgtccttggcagcagcccaggctggagagatggaagccggaagactccggagtggcacagtggttgcagggcacggggatacttaggaaagccccttgccaggcagcaagagctgctcctctatgtgcccccttcctgcccctatctcaggccccgtgcatggagcagaaggaggccaggaatgaactaacctcatttacatctgtggaagggacgctggtcttgctgggccgccctgcggtctgtggctggcagggagggtgagaaccattcaaaggaggccgcctggctgcacagccaacccatgtggagggcttaatcaaagccacatttgggttggcaaaatctcagtctcctgaaggatttcaagccacgaaggcagatttggactggtttaacatcatggctcgctgacgaccacaaccatcccacaacagaacgtcttccttcctcgggggttcactcccccttggagaaggaattcaaacagaccagcaccagagggaggtcagaacggagaggacctctggggaccttttcaactctaacctcctgagagtctttctgtttttttttacagaggtgaaattcatataacataaaattaaccgttgaaaagtgatcgatccaggcgcatttaggacgagaccaaatcaaacgcctgttttgtgagtgcaactaccacctctatctagttccaaaacattttcgtcatgctagtatggactaaaggtttatgtcctgccaaaattcttaggttaaaaccctaacccacaatgtggctgcatttggcaatggggcctttaaggaagtaattaaggttaaatgaggtcataagggtgcagccctgatctgataggattagtgtccttataaaaatagacattggccaggcgcgatggatcacgcctacaattccagcactttgggaggccaaggagggtggactgcttgagttcaggggttctagaccagcctgaccaacatggtgaaaccccgtctctactaaaaatacaaaaaattagccaggtatggtggcacatgcctgtagtcccagctacttgggaggtggaggttgcagtgagctgagatcaggccactccagtctgggcgacagagcgagactctgtctcaaaaaaaaaaaaaaaaaaaaaaatagacatcacagagctccctctctctctctctctgagcacacaccaaggaaaggctgcatgaacacacaatcagaaggcggccatctgcaacccaatgggagagtccttaccaggcaccaaccctgctggcaccttgatcttggacttcccagcctccagagccacgagaaaataaatgtctgtagtttcagccacccagtctgggacatcttgtggcagcccaagcagatgaatacacaccccaaaaggaaacccggtaacttttaagcagtcacaacccattcccctcctcccccagcccctggcaaatgacaatccactttctgtttccatgggtttgcctgttctgggcattttacataaatggaatcatacactatgagaccttttgtgcctggcttctgtaacttagcagaatgttttcgaggctcatccacacagtagcatgtattagtgttccattccttttcatggctgagtaatattccattgtctatccatgggtatccattgtgcatacaccaccatttgtttatccagtcatccctgggtggaatgtgggttgtttccaccttttggctattatgaatattgctgctgtgtacatgtgtatacatgtattagtttgagtgcctgtactcagtttttttgggtataagcctaggaatggaattgctgggtcacatggtaattctatgtttagctttttgaggaacaaccagattgttttccacagcggctgtaccatattccatttcccccaggggtgcataagggctgagacttttttacccactaggagtccttctgtggctgggagggttgggttaagcttctcccagcccaggtcccactcaaggaggtctggacagtcacagcattagcgggaagggagcctatgcctcaagcccacaggagagagctccagacaaagcggccaggtacaataccctctcatacgcagcttcctcccagcctgcccctagacaaagggaggctggagtgggcatctagaggctgctgcccagctaccaggggtcagaccagaggggattctgacatacttcaacatctggaacgtggctcttggtcactaaagagaagacaatgtggaagtgcctttttttttttttgagacggagtctcgctctgtcgcccaggctggagtgcagtggcccgatcgcagctcactgcaagctccacctcctgggttcacgccattctcctgcctcagcctcccaagtagctgggactacaggcactcatcaccatgcccggctaattcttgtatttttagtagagatggggtttcactatgtgggccaggctggtctcgaactcctgaccttgtgatccacccgcctcggcctcccaaagtgctgggataatgggtgtgagccacccgcccggctggaagtgcccttttgagtgtggatgcccacaccttgagtcatgggtgcccacccaagtcatgagcacctacctgagccatgagtgcccaccttgagccaggcctatggagagctccccatccaaagtggggccatgccagtgatcagtgatagtggctgatttcccttcctcagtgaccccccatcctccccactcccacctctctcctacccactcacccttcctcctgtgaagccaaggagttctgagagagcttagctaagttcttcgcatagtcttcttcaatctttatcctgcaaagagagaaaacccaacacacatcagctctccagtgccagatcgtgggtctgccctgctgccctgcacacctcagccgtggaaaggaacccactagaccataagctctgagaccacatggctcttgtctgtctacctgacatgcagtaggtgcttaataaatacttgttggataaatgaatgaacaaaactgtctggacctccatctcctcatctgcaaagtaggacattttctccggtctcctagagctgtgaagacgagagctgtcgtttacacagttcctagcacagaacgggaaacataagacccctgaaccaataaatgaatgaaggaagaaatgaacgtttgcaactcgtgatggactaccagcaatccccagtgctgtcccctctcccttccagccccagaactcccaggtggcctcggaccctcagcagcagaacagaacatctccctactgtctcacacccccaatgcctctgattgtcaagcctgctgggtacaagtacttccacggaaacctagcagtgcccagggctgcaggtagattctatttccctggagaggaaagttgccttggatgtagcttccggcaggcaggcctttgacacatttgcaaggcaactccccagggagtgtcctgtattatctggcacgtccatgttaagcatgttgtcagaggtattgttcaccacctaagtggtcctctgggccacagtgggagacagaagagctatgcttatgccaaccagagctggccagagcccaggcttcggagagcccctggtccaccacacggtgaacagagaagctccagagatgctgggaccacagcgtttgcttcccagctgctcaagcagctggcacccaaagggtgcgatgatggagagagggcggctgacaaagtctggcggcagcattccgagtaataataattgcatgacttggcatcaggagactcacaatctcgttccttcttgcactgctttcccctcacctccaccttcaactggtctctaggtcctcctgagtctcattccaactgatctgcctctgtcacttcctctccatccccctaccttcacctccagactgtggtcaagagagatatctagaaagtagatctatccatgccacgctcccggctcctcaatgccgacagcatgcaccagacacacgaggtgcatacgctgtctgcctcctgtgtctcacctccaggacgacagcgtgcgtcacctctacctctgccccacttctctaaaccaagatcccagcaaaccagccagcacctgtcctcaagccaggcgagctcccaattctgagcctcagctctcacctctcctggcactaaagggccttccctatgagatcccaaggtggatggtgtatgcgttttctctaggaagcccggaatgtcctgaaatggcagtttccaattatttgctaacaagacgttgtcatggaaatataaaccataagcgtgttcaagctttggcttttacagcaattttcctatttgcctattttataccattgttttctcaaacccgagctgtgcaacctctccgtttcccaccagtttaatgggtcataaaataaggatttgattacacaaattgaaaataggccctctgtctatgcccataccaccctgaacacatccgatctcatatgaaaataggccctctaagggaaaggggtgcttcaaaacgccgaagcattattacttgattattgctgttataattaaaaaggaaatatttttggtctggcacagtggctcatgcctctaatcccagcactctgagaggctgaggcgggcagattacctgaggtcaggagttcgagaccagcctggccaacatggtgaaaccccacctctactaaaaatacaaaacattagctgggcgtggtggtacatgcctgtaatcccagctactccagaggctgagacaggagaatcgcttgaaccccggagatggaggttgcagtgagccaagactgcgcaactacactccagcctggatgacagagcgagactctgtctaaaagaaaaaaaaaaaagaaatattttaaaaagatattgcaatttgctatatttccaactccaggtggaaagttgtgtgtttgtgtgtgtgtgcacatgggtgataggtgggtatgtgcagctgtgggtatgtgagtgtgtgctgaacagagcctcagaacttggagacagagagagaggaggaaggagatagagaaggaacttctctttctctttgtcgatttctccatttccattgggctgaatttattgtttcttcatctgtgttcccaagctctttagacaaaacactgttataatccttgaggcagggatggggtaggaggagggttcaacatctcctgccctgggacacaggttttggctaacgatgaattgaactgtaacatcccccccactggttacggtaaagggctgtgcttcaaatgatggccaggtacataagtaaaggagtgaaggagtctgcgggggaagacagtacggaatggtggagactggcaaaatgggaacacacaccccctctacaagagtagctgctactcagctccagccaagtgtcgcgtgagggatgtggaggcaatcctgccaatgcttctgctctttcaaggtgtgctaaatatccagattttaatatgaaatctacccatttttttaagtgttgctttcaatatttaaaaacactatatcggccaaaggtacacaactgctgaccagatccatcccaggcgccatgagtttgccgcctggcgctaaccagcccaatgctgagtgtgcagtactgagtcctgtgctgtcgccccgccccggccacggggccccggggaacactggtgccaggccccagggctgggaggggcccaggcttcacctttcccggatgaattctgacatttccttctgcatttgtttgcccttcagctgtttctggagcagtagttcaaacccagccacggtgccgttgccttgggggtccttcttatcagcctacaaaggaagcagaagcacaagagtttagggcacgtctgagtctggagccagggagaatggcgtagagggaggacggctcctagatgtgcctggcaatcccagtccagcacaagacgcgggagcagctgtctctgctgccctaactcggatctctctcctggtgcccccactcccaacagcgctttctgatgctcaggctcttacagttgctgcatccccacatccaagccccttaactctcccaacctgggaactgagaggaagaagggcaagtgtccaagagcaccggctgtgatgcctaacggcctacgacttccaaccaggtggctgcagatctggcttggccctcggcgaatcttggcatcctgactccaagctggactatgtgtgagctcaggagcaggtacccccagccttaagccatcctgtcttctaccaacttcttacactggtagggcagtgacaccctctaaccacacattcatacaagatcacaggagagaaaagtaaatcatagagagaaagtgggttgaagggaggccggaggagagaacaggacaggctgccctgaaatactagctgggtgaccttggccaagttcttcactcactccaggcctaagctttttcatctgcaaaactgacgaaataacagccccaccttcatgtggtcatttcagggtaaatgacctatgtatatatctgagcacattgctgagcacatactatgtacccaataaatggcatctgttattagttacttttaaataaaagtccaaacttggggaggatgggcaagtcaatgaaataagtacttagcagccaattaattttgcaaacaaatattcttaaaatttcaaaattaaatgatttattttattttacctgcatttcttcaagcataccaaatgccccttccctgccattcccctgcctgagattcacccacacatctgcccgcacggccgtggctgctggagcaccagctcccagggccatcccaggcatgtctaaaagtgtcctcctccttacagcttttccctatcaggaacccagggtcaaacactttgatacttaatggaaggtgttcagaacaggtttttgatatcccagagagagaggtgcattggtgagaacagtgtcccagcatctggtaggacccaggttcttgtctctgctcagctgcagggtgtccaatcctaggtagtatctccccggaccacccccttgaaataggggtgggttgcatctctcagatcccatccagatcagacattttaggagaggggaaagaaaaggggttgctgatgcctgcagggaaccccatttaccatcatcaagtagatgaaggattttatggacaccttcccagttcccccggtgtgggacccctccctcgggtgccataactcaaaggcctccggccacgctgctaacatccctgatgacagggagatcaccatcctacggggtcacagtcgggctgttcttgcagtttaaaagcaatgtccactgaagatctctgtgcttcactctacgaatgctacatcttgatgaaaaagcagaaggaaaattatccaaatactgagctcaaatctgcctcccttctaggatggatatgctgagctatgcactctggggaaaaccagccagaagaaacaggctttaatgactgtgtcaggagagagaaatttctattaatggaaaaggccttgatggtcagggggataagtggattgcagattaagtatcagagtccccagagagctcgaattaagataagaactcacaagtgtcgccctccggatgctgctggatgcaggcggcatcagacattcctaccagctttccaaggcttgagaccccacacgctgacctccagcaactaggatacccatttccagggctcaaaccactctctccttgaaccctccatttactgcacccctcttgagagatgatgtttccaaacccaggtacatctctccctctctgccgccaccaccatctttcctggtctcttccactcacccgtcaacttcccacccccacctgcacaatgcctatgaatcagatcacatcatattgctgcttaagaccttctaacaccctccttccacaagcagaataaaactcacttactggggcctagaaagtcttacgcactctgatgcttgcttaccccgatgcttgcttaccccgccctctgagctcacctgcccaggtctgtctgatgccaaagataagcccctttatactgtttcctcaaccaatgcacagatctctaccctggacacagcacagctggagctacagaaattgtgccttggtgagaggtgtaggcaacagggatctttgtatatcttctaaggtacaagcgattttgtagaaagagaaaagcacttttatctagtattcggttagcaaatctaaaaaagtgtagataatccggctgggcacgatggctcatgcctgtaatcccagcactttgggaggccaaggtgggtggatcacctgaggtcaggagattgagaccagcctggccaacatgatgaaatcctgtctctattaaaaaaataaaataaaatacaaaaaattagttgggtgtggtggcacacatctgtagtcccagctgctcaggaggctgagacaggagagtcgcttgaacctgggaggtggaggctggagtgagccaagatcacaccactgcactccagcctgggtgagacagagtgagactctgtctcaaaaaatccattcttgcaaagtggtgaaaacaaagtttttacttatttattgttccttggagtctttggacacttgtttttttgaaatgtacaatttagtggttttcaatacattcacagggtttgtgaccatccccactatctgattccagaaaggggtgatctaattctgaaagtcactatgactttaacatgcaaatggcccaggaccattcccaggatattctgaggtacaggactctgcatttctacaaatttatttatttgaatggtgaaaaaaatacatctagcacacaacggaccattttagccatttttaagaatgcagttcagtggcatgaagtacattcacatggttgtgcgaccatcaccaccatccacctgcaaaattgtctttaatcttgcaaaactaaaactctgtgttcgctaagtgatctgcaaacgttttaaaactacaggattacccaagctggagctctctgaagatcctgtgcccaactgcctcacaattctgatgagaacactgaggcccaaggaggtgaagcacttgtccaacgtcactcacgtaagtgacaagcaggtatggagcccacgttcatttattgaggcagattctagtctcctgccttcactgagcatcggagaaaatggccccccgcttacctacattctggttgaagtgtctgtaatgtgaacaaaagtcctgctgaacccctgagattcatggaatgagctggaccccaagagggtcctaagttcctgtcacagatgcaaactctaacaccagcccttcacgctccaacgagaaaggcccctccactttgagatccaggtccctcctacccatcctgggtgtccactcccggtcaccggggtcacgctgtgggggaaactgaggcgctgcttacccagaagtagtcgcagtagctccactcggttggtttcagcagctgctgttccggcatcgtgtctgggtgagggaacgtcacacagtttatctgtagggcacagaacaagaaagaatgaccccgctggagactggaatagcgaggaaggcttcggctcctgggggacacggcactggagcagcctccctattgacagaacacgcacagggatcttcccgtgctccaggggccagcatttcacatgagcggcaacaggtgctcacccccaccccaaatgggctgtgaaccagtaccacctctctagatggcagtttactaggatcaaaattgcaaacttcaggtgcctttgacccagcaattgcacaagagtctatcatacagatacagttgcatgggggcagtgacatccacacacgctttttcacgacagcgctatttatggccgttaaaggctggaaaacaactccaatgtccatcagtgggggaatggttaaacaaagtatgagatagacatctatggaaatcagaaaggacatggtgatgaagttcttaaatttaattaggaaagcggccgggcgcggtggctcacgcctgtaatcccagcactttgggaggccgaggcaggcggaccacctgaggttgagagttcgagaccagcctgaccaacagggagaaaccccgtctctactaaaaatacaaaattagctgggcgtagtggcgcatgcgtgtaatcccagctagtcgggaggctgagggaggagaaccacttggacccgggaggcagaggttgcagtgagccgagatggcaccattgctctccagccttgcagtgagctgagatcatgccattgtacgaacgaaactatgtctcaaaaaaaaaaaaaagaaaatttaacaaggaaaatgtgccaggatatatggttaggtgaaggttaaaaacaaaaaaaaaaaaaaagcaagcagagtattatagttccttttcaaaaaggaagacaagaccagcccctcctcttcctcctcctgcttcgcccattcaatgtgaagatgttgaggatgaagaccttgaggatgacccacttccacttaaagaatagtaattatatttttcttgtttataattgtcttaacattttattttctctagcttactttactgtaagaatacagtgtataatacacataaacatgcaaaatatgtgttcatgtcagtaaggcttctactcaacaagaggctattagtagttaagttctggggagttcaaagttatatgtcaattttggactatgggtgaggagggggcacccctagctcccatgttgttcaagggtcacctgtataatacacatctggttatttgcatatagaatattcctggaaactgataacattgtttgcttccaaggaaaggaactgtgtgggtgagggtcaggggtgagagattaccttgcaaattttatgtcacgatgtgtatcatacgaacaaatacaccttaaaattataatctggggggccgggcacggcagttcacgcctgtaatcccagcactttgggaggccgaggcaggtggatcatgaggtcaggagttcgagaccagcctgaccaatatggtgaaaccccttctctactaaaaacacaaaaattagccaggcgtggtggcatgtgcctgtaatcccagctactcaggaggctgaggcaggagaatcgcttcaacccaagaagcagaggttgcagtgagccgagattgtgccattgcactccagcctgggtgacagagtgagactccccctcaaaaaaaaaaaaaaatctgggttgcacgtgtaaggctggccctagctaaggagcgtgaagtacagaaattttcaggtcatctcagccttttctgcccgagcacatctgcaatactgcctggcttttccccattgtgtggaggtggcttcaggccccagattcccacctctcctaggacgcgggctaatttgcttcctctgtgggagcaaggcctgagccttataagtctttaaccccttcttgcagcccaagcacctgctgaagtggaaaatgtcacacattaaaaaatgatgcagccctgaggttttgggcccaggacacaaactccaatgctaggcggggtgtgcaagccagtgaggtacccaggcgtcacagaaactgcagctgggacaggagggcggacagcgtcacagaaactgcagctgggataggagggcggacagcatctgctttgggcaggggtcagaggctgcagagatgcgtccaaggggcagatcctgctcagctctttgggcaggggccagaggctgcagagatgcgtccaaggggcagatcctgctcagctcttgccaagtgtcgtcaagcccttctgaggagtccagtgctgacggattatgtgatgactcgagggaagctgaaaatggggacttttatgcaaagtgtctccatttttaagtgttggcaattaattcaaggttaaaaacaataataataaacacaataacaccatgtaggcccaacaaactcttctgtcagcaaagtcaggcccatggacctcccgttgtgacctctggttcaggaagctcctgggtggctagaagtaaatctagcgcacaccccctccccagctgccagggcacagacctcagtcgcagtctggggagaagtccccaacaaaagaaggagcctcctcctcccagatccttacatgtggttaaggtgagggctgaggtccccaccaccctagagggaaacacaactcagcagaaggatcagaggcaggaatgacgtggacgaccctggagatgacagggctgcaccaaattctgccaaggataatcccttcttctctttctccttcccttcctcccctcctcccttcctctcctcctctcctcccctccctccttccctccctctttccctcttcccctccctccttccctcctgccctccctccctccctccctttcttttttagacagaatcttgctctgtcaccaggctggagtgcagtggcacgatctcggctcactgcaacctctgcttcactggctcaagtgattctcctgcctcagcctctcccgggtagctgggattacaggtgcatgtcaccacacctggctagtttttgtatttttagcagagacaggatttcaccacgttggccaggctggtctcaaactcctgaccccaagtgatccaccctcctcggcctcccaaagtgctgggattacaggcatgagccactgtgctgggcctctttctccttttcaaaatgtgtaacttctaagaatacaacattatctatgtaagattcctggccagggcatggtggctcacatctgtaatcccaagactttgggaagccaaggcgggcagatcacttgagctcaggagttcaagaccagcctgggcaacatagcacaaccttgtctctacaaaaaataaaaaacaaaactagccaggtatggtggcacacacttgtagtcccagctacttgggaggctgaagcaggaggatctcttgagcctgggaggttgaggctgcagtgagctatgattatatcactgcactttagcctaagttaaaaaaaaatcctgtcaaaaatatttaatctgaatctaatgataagtggggaaaatcaagatagttttttaaaaggcaccttgtggcagcgtgtggtggctcacgcctgtaatcctagcaatctgggaggcccaggtgtgcggatcacaaggtcagaagttggagaccagcctggccaacatagtgaaaccctgtctctactgaaaatacaaaaattagccgggcatggtggtgggcgcctgtaatcccagctactcgagaggctgaggcaggagaattgtttgaacccgggaggtggaggttgcagtgagccgagatcgcgccattgcactccagcctgggtgacagggcgagactgtgtctcaaaaaaaaaaaaggtgcacagcttcctgaactctaaaaaattagcactgtgatggattaaaaaaacaaaggctagatgaagatcagctgaggctggggagttttctcccaggcctcagcagcctcagtgagagaagggagggccagttcttgaggccagcagcagaaagccccaagccttggtttcgggccgagtccccaaggtgtgtccagagacaagtctccttccttcctgtgcctccacaacccactgccaagcaggcaatcatgaaaacaagggacgggtttcaaaagtgcacagattccttattttgtattccaattattcttatttcaacaaatcacagtcatcacagtccatctttatgttactgaataatgcagtccatgaaaatttcaatcaaatttaatgataaattaactatgacattaaagtaaattgagcattaagaatgatggaacgagtagagttgtgggtactcagaggcgggtctgaatgcttctggagtggcctgccctgcgggcatctctcccctttccatcgtctttcctcactcaaactgctcttggccttgccctcttgtcggggaaacacttccctacaaagaaaggactttcctggccaggtgcggtggctcatgcctgtaatcccagcactttgggaggccgagatgggtggatcacctgaggtcgggagttggagaccagcctgacccacatggagaaaccccatctctactaaaaatacaaaattagccaggcttggtggcgcatgcctataatcccagctacttgggaaggctgaggcaggagaatcgcttgaacctgggaggtggcggttgcggtgagccaagattgcgccattgcatcattccagcctgggcaacaagagcaaaactctgtctcaaaaaaaaaaaaaaaaaaaaaaaaaacaagaagaaaggactttcccatgtcaggaagaggcttggccaaaacgtggggcaggcaggaggagaaatgggtcttggccagtcttgttccccccagaatcttcctgagttgacttaccctcagagtgaggatgccaccgtgcaccccagcaggcctgtgcagacagactgctagccggaagaggagacggtaccaaggacagccccttcaatgatgcatcctggctggctccaagccaaccacctaaaaggccatggaagtcctgaggaggactgagacccacctaagtaccactcagtccccttcttgtcccagagtcgaggatgaacatgcctcagagtcacctagaggacatgggttgctgggtcccaccccccactgtctgattcaggagctctggatggggtctgagctctcaagtgatgctgaaggtccagggaccacactttgagaaccagcattcgtgatccatttagcagggacagggacagcccctgggggagaccttgtgcccaccacaatggaagacacacagataaacaagccacagagccctgctcttaagatcctacatggcaagtgggcaaaggacatgaacagacactttttctttttttttttgagataaagttttgctcttgtcaccaaggttggagtgcaatggcatgatctcagctcactgcaacctccacctcccgggttcaagcgattctcctgcttcagcctcgcgagtagctgggattacaggtgcctgccaccatgcccggctaatttttgtatttttagtagagacagggtttcaccatgttggtcaggctggtctcgaactcctgaccttcaggtgatccacccaccttggcctcccaaagtgttgggattacaggcgtgagtcaccgcgcccggcccagacacttttcaaaagaagacatatgtgcagccaacaagcatatgcaaaaatgctcatcaccgctaatcattaaagaaaggcaaatcaaaaccacaatgagatatcatggcatgccaatcagaatggctataattaaaaaggtcaaaaaataacaggtgctggcaaggttgcagagaaaagggaacacttatacacagttggagggagcataaattagttcaaccatgtggaaagcaatgtggtgattcctcaaagaactaaaaacagaactatcattcgacccagcaatcccattactgggtatatacccaaaggaatataaatctttccacataaagacacatggacgcatatgttcattgcagcactattcacaatagcaaaaacatggaatcaacttaaatgcccatcaacgatatactagataaaggaaacgtggtacatatacaacatgaaatactatgcagctgtaacaaagaataagatcatgtcctttgcagggacatggatggagctggaagccattatccttagcaaacgaatgcaggaacagaaaacaggttggggcagaagagtaaaggcagtagaatgtgaggactcattaaggactcatcaccctgctgcttctgccactccttgaggataccagtcctcagatggagccccgaggtgcctgccactgtctctgtcctctctcattttgggatttctccctcccaggaagcccactgggatttctccaaatcctcactcctgcaggggagccctgactcaggcaccctctttagggctttgcatgtattctcatttcatcttcccagcaactccacaggggaggaagaacagcctcatcgtatatgaggaaactgaggatcacagaagcgaggtatccgaatccagatccagctgactgcagagctccagcctcgaccacgaagctatgtgatgggctatttgctcgttcactttccattcgaacatctgttgaaaggctgctcagtgccacgtgctacgctagctcttcccagcaagctgcatgcatacatttgtaatgatatttctcgtgatggtttatttaatgtttctcctccttgccagacagcctgttctacaaggggatggggaccatcttttccctgccatttccctcctgactggtgcagtgttgggtacatagtgggtgctcaggagatgtttcttggtgcagtggccggaggctaggaatgtaaggcatcatctctgctctcaacagttccgtaaataagtcactgtaattctttgggataaacctgccagtggagtaagcctgaggtgctgaggttactggaaggactgagggtccaggggaggaatcttagatttaggtaataatagtagggcccaggcagacagaggggtgggaaggtgagaagggtactgcaggaagggaaaggactcaggatgagaggatatgccctacaggtggggaccgcgttgctcggtttggctgagctgtgtcccactgcgtacccctcagagagcttctgggaggcagcccttgtgcttctggctgctcctgagtcagggagtagacaagactgagctgagagggggtcttgcaggggtgccaaggtctgtcctgaaggcagcaggacagcgggggccacagaagcaccctgcaggagagtaacaattaatcaggctgttgtctggggtgagcacccccactacagcatagaggatgcactggagggagaacgtgactgtggccatcagggcagtctgcagtgatgggggatggggggtggggggtggggggtcatgatagcagctgggagcagcatagtcaagaggggattagaagaagcctgggatactctacaggtagcccttgacagcaccatgaagtcaattcagtgatgcccatccagggacaatttttcccccaccccagaaacatctagcaacgtggagacatttttggttgtcacagctgtgtggggtcgagggtggatgctattagcctctggttggtaggggccagggaaggtgatacatatctacaatgcacgggacagctccccacaacaaagtgctatccaacccaaaagatcaatggtgctgaggctgagaaaccctgagttgactgacctgggtggagaggaagcatgtttccatccattgggatggaagatggaagaacagtcccttcggagagagggaggcagtggcagcagaggggcatggtgagaggtgtgtgcgcgcagatgtcctggaagcaactggagcctcgatgtttatttgcaatggtctagtgcaacctcatgcacagatgaggaaactgagacacagaatgtttaattctagttcactataagtggcagagcagggtccagaaccagcttcctaattcctgggccaccacttttatccttgctgtgtccttctgtgacatccagacctcaaagtcaaggctcctaggtccctggatcagaagggctgagagggccacacagctccaccctgcggtgctccaaagcccaaggagggaagagaaggtgggacaggactttccgcatgtggattcctgtcctccccccggttacattttcctgatggttaataccagggtccagctacacctctggaaagacctcatcctcctcccaaggcctcccaggcatagcaggagcttcactgccatcctaaagatccactttctgtttgttcaacaaaagcaaataatgtgccagccacagttctcagcgttttacacgtattagctcattgaatcctcacaacagccctgcaaggcaggtgctattattatccccattttacagataaggaaactgaggcacagagaggctaagtcacttatgcaagatcacacagtttgtgcatggaataggtggacccaggctctgaacccacgcaagccggcttcagtctaggctcttagcctctgtcacactacctttccaacacactgaggtataaatgtgccaggtccccaccaaaggcaggggctcaaaaaggaagggtgctcaagagggagccagagaggggcacgcctccccgtgtgtactgctcagggcaagttccagcaggcagtcccaccctcacttcccccgagaccagtgtcctcaacaaagccgcgtcttcgctcttgcaccaactctgttttctccaaccctcaggtaaatggagtgacacccccatcgctccccagctgctggggtccactgtgcagctggggttcctgcagggcttttccgcacaggagcagccagaagcacatgggctgcctcccagaagctctctgaggggtacgcagtgggacacagcagccagaaaaccacctggctgaggtgtgagagccactgaacacacgtgtgaccaagggggctgacatacggaggccccaaggcatgcccctcccctaagtcctggcccagcaggagcctgtggggaacagaggccacaggcttcttgcacggcctgtttgaccaccttgcctgcagcagagaagggaaaatggtttgacaactgagggttcaagtccaacaggctctgaattttctcccagaggaaagctgatctgggagggtatgggagaggaacaagccagccccggagctctgtggaacagagaagaagagtagacaggaccccaagggttcacctccagcccctaccccgggttctgtggctacgctgggaagccctgaagctgaggaccacaggtgtccccaaattcctctttccaggtgagagtgtggccgggtggctttgctgtcatcttttctgaaaccctctagattcagacgcgttcatgctcctgccaagggctgtgagctgccatgagcacccgtcactcccaatcaaacagcacactccacctgccagccccacaccagggacagcggaaacaagacccagcaaggctgccagcccctgcccgttgctgtcagggggcccatgtgtctgtcccctgaaaacccatagcctggggaaaaaggagcgtcagaatccagctccattctttctctggatccaccaccctttgctgcccaggcctggaaatttctgctctgcgggatcagacagcacgggaagcggctcacctcatccctacacaccacagaaaaggaagttcacgccccagcctcctgagacctgagccatccctttcgccctgagcatctccttcttgggaaaccatgaactctggaggatcagaacccagaggaagaggctgggcatgggagagcggtgttgtgtggaagggaaaaggcaccaaggcctggagacctgtgggccaaggccaggtggtacaccgggaagtgtcctgggccagcagccaggagacctgggttcaagtcctgggctctgctcctcacttgttttgtgacctctggccagtcgctcctttgctcagtttctctggcaaaaaaattctccaaggcatgagtgtttacttaaaacctctggggaacactggctcaaatgcagattttccagtctggccccagagaaaacaactgaaggtctggggtgccatccaggaatctgcattttaaaaaaggtcttggaggcttgagaatacaatttgcagactccctcatgagaagcaatgatatggctcagcaggaagcgacagggaaggcagggatgggcgaggtgtgctgcccatcaggggcccaacaagggccgccatcagccccctccggccacacccgaagccctggctgtaagatggactccagcaggtgccccaccctgtggcctgggcaccatcactaagcgcctttaaggcaaccctccacgacataacactctgcttttcactttgcatttttgtttttcttctagaattcaaatatgtctcccactccgacctccccccctttctcctccccctcctttttatgtatttcagaagactctggagagctcctgctgtgccccagcattctggggcattttgtgacaatttgaagatggggactgtaccctctggaactctgcacctgagcctgcccacaccccctacccaccagctccatcaactccaccggtaacagggaggctgctgctaccccacagtccaagcaggctgagtcgttctgcccagcccttggagacaccgtccatcagcacagggcactccaaaggagctcatgacacaaggaacccaagccagctccagaaggggcactgtggtaaggacatagatttcaaatcctgatacttcccagctgggtgaccgtgagcaaggtgcggctctgtgcctcagtttcctcatctgtaaacagggtgatgagtgtgcacagagcacttactatatgcaggctctgttctaagtgctttccatggatggacccatttagtccctacaccatccctaaggcagagaccacccactaccccccatttccccacttgacagttattgactgagacgggaagaagtcaagaaacttgccccaggctgttgcactgtcattaatataaccgacactctggcctcagagtccacgttcatcatcgttatactatattgattccacgactgacacttcatatagctaatggacaattaaatgagccacttggatcactacatgtgcataataagtgcacacaaaagttgcagcaattgttattgttaattgtttacctacactttttctcccaaagcaggatgtgcagcctggacgaagcagggaaatgcacccactcttggttttgtctccacaggggtggtcggaatggctcagagctgtgtgagttggagcctaagagagcaataccccgttccctgctctcctgcccttgtgccaaaatagcaaacctgcgaccacacttctcaggcctgtgcccctcagggggcaatgatgtccagccccagctgccccaaacacagggctgaggagcagaggtggagtgtggggctccccttcatctctgcatgggggtgggtggggtgggctccccctcatctccacatggggttgggcatctcgaagcgccctgggaggcaggctggccactctaggcagaagctgcctgctcccctcagggactcctaggaactctattcttaggacgctttctcttgctttttactttgacatcttccagaagttaccccgcacaaaagcaaccctgccgtggctgtaatttacacgtcacatcacttgcgctgagcacagtccacccccttcaacccactcccgcacgcataccttcccctcctgccctgaaaaaacggcttctgcatcatcccagccatcctccttccacttgttcaccaggagagaagtgaaatgtgaaattgacaggagaaggggaggtgggaggggcatgtggatggggaacttgagtgaaatccgagctttggaacttccccgtttccaggttgggcatcacttctgcttggcggtccacatcgccatggcaacagcccagccaaatgccccagctcgcagcccaccctgagggcgcccctcgggagccacttactgtgatggtgttttccttgctctgctttttgcttggcgatgaggatcccaggttctggggagagaggcaagaaacatcgtcaaagctgttctccatattggacattttttccccccattcaggttccctgagggtggaggcgctggggaatcagggatgctcagtctgaatcctaagtcaccatattctgggccagggcaagcaggggtctccctgaccccacgctgttcccacgcccagctctcgggctgaaggcgaattaaggaagcctcctgcacaggctctgagagaactgctccaaaccaggtctcccctcctcttctctcagtctgtgatttggggagttaacccctccgctgccctctgctggtgaacgttccgcgtgccgcttgctgcctgaagccgcggaatccactggggagaagagagttaaggccaccacctcctggcactgaggaatcagcacacgacattttattctgaaaccccccgggtccaaaacgtcaaacctaaatacacacaatgtgcactggggcgctgctcggtcacctccctgactccccgctcccccaaccccgtgagccaggagggatttctcagccaaaccgacttccagcttccactcagtctttatattgccttttgatgtcttccaccgccagtaagaaaaccagagtcccaagtacctctgagcctggggtcctcagcagtttgccaaagtcctgggatcgttctggcagagaaaattaaggactgccagtgcaaaatgctacacgtgtcctaagagcctacgactccaaagaatgtttgattctgggtctctgttgttctattagcaattatgttgggggctcaataccagagatccccaagcaggacctgggatgtctcctatcctgagccacacagcaacctgggaagcaggcttacccctaaggcaccgcaggtggccatcacacttgtgccccaggacttgtgcatgaccttattctttttttttttttttaagatggagtgtcattctgtcacccaggttggagtgcagtggcgtgatcatggctcacagcaacctctgcctcccaggttcaagcaattctcctgcctcagcctcctgagtagctgggattacaggtgcccgccagcacgcccagctaatttttgtatttttagtagagacagggtttcaccatgttggccaggctggtctcgaacttttgacctcaggcgatccacctgtctcggcctcccaaagtgctgggattataggcatgagccactgcggccagtctggccttactcttccttggtagaatgtaaggaagtggctgtcactttatagataaaggccagaaaaaggatggaggggcttcaacaagaaggaaccaccggcttggagtggggggcaccccgcccctcaggccagcacgaccctggacacctggccaaatgaccatctgcaggtgagggcgagcctttgcctcagaaacccgtcagcaaattaggcaaaccagggagcttgactatgcccctgctaaggtcgcatacccttactcccatacagtcttacttgggttgctaattaaagtcaactcaggaaaactgatatccttaaggtgtctagcaaaaatgaaccttacagagcattaatttcacagacaagaaaatgattactagccttgagaccctggccagagaatctgacttctttgagcctcaatttctccatctgtcaaatggatggttatcactggtcctcaagctttgaggtgcatcagaatcaactgaggaaaaagtgtccaaaatagagtcccagctgcactctcagctgctgggcctgatccagcaggtcccaggtggtgccagcacctctgatttgcagaatctgtggacctcactcagagatacatggatctgatctacactgtggtttcactgaggtacctctacttatggcaactcctctagtgaccccaacgggctcctggccaacgtcaactttatggccaactacagcttccatagacatttttagtgcatcatctcatccagctggcccaccctataccttcccacttgacaaaactgcacagggagaaaggcagacggaggctacatggcaggaggtaccagtcaccaaggagaagagacagggatagaagtctctctctccataggttcattcacgtacagactctagccaagcaaatacatggcaggaaggggaaagagtagcctatgggatggattctgcagtctgcaggagtctgtcttcctgtcatggacacattaccaccatcaccaccgcgttcccactgcagccccccagagaggggaaccagcactccagcagccttggcaacagccttcgagtctgcctatggatgctgatgatgttggtgatgagggggctaaggggagaagcagtgcaagagcgactgtctactgagtgcttgcttattacggcaggctccaggttagccatctgacatatttaatctcatttcatccttacaaccccagcaagttaaatggcatcaactccattttgcagatcatgaaattggggcttgcagaagtaaaactgtccagggtcacaaggctatagtaaacagaggagtggaaattagaatccaagcctgcataactctttcctctatcttccgccatctctccactttgagacctgagacaatattttgttttccatgtgtctttgcaggaaggcaaaaaagatttccatcaaccacaaacatatattttgggaccactgtgtataaatctctgtagaataaggcttgacgcagaggtcgcacctcctccttataacttggctaggataggaatacaagtaatggcattgaggttgggtgttccacgtgttaggtgtcagcaccttccctggtctctgttctattagcagtgttttacttcaaccactgagggccaaggtagatcacaggcaatctcaggctctgcctgtgctgctgataacctgtgcctactgctccaacttcatatacatatcacgtgcattttatacacacacacacacacacacacacacacgtgacacacacactatcataattctccattgaaagggcccagaaggaatgacatctcatcacagtgacaacatctactggctagaaattggtttccaaatattaccggaagctccttggtactaatttcaaaggcaggtatttggaatatcctattgtaccaagaggtaagaaagtattcagagaataatggagagataacaaaagaacataaacaacttaaagggctaccacaggccaaatctgcgacaatttgagcacaaatatgaatgaatgactgcaactaactaactaactccaaaggggaagggagagaacatttatttcagaagaatgccaataaaaaatgtacaagaaattggatgaccaccatttgcaaaccccagcctcaaaggggactcaggccatgatcctcaaggatgctgaaagcaggggatggaaagactgccagggcacaggatactcacagggtcttacactggcacctcacagatgactgacaaattagaaagggaaaatgtacccctgcaaaggagaaatctggcagtcagcaccttaaccgagagtgcaaactgagcctcatgagtagggtgccaacctgggtggttgtgcccccaaatgcagtaaaaagaaccccacatgccctgtccagctattcttgcccaaactccagaacctgaacctacgcataagagaacagtcagaccaagaacgcaggttattctataagacacctgacctggactcctcaaaaataaatcgtcaaggtgatgaaaaaaaaaaaaaagaaaaaaaggtgtaagggattgagtgtagaggcaacgagacaggcaacaacttggatgaaacgttctatccatacgacagaatattcttctgtcataaaaaggaatggagtgttcatccatgccgcgatgtgaatgaaccttggaattccaggtgaaagaggccagacacaaaagaccacagatagtatgataccatttatatgaaatgtccagaagaggcaaacccatagagacagaaagattaggggctgcctaagtcttcaggtgattctgcttgggttgatgaaaatgttctaaaatagatttgatgatggttgtaaaactttgtaaatatagtaaaaaacactgaattgtatacactttaaatgggtgaattgtatgggtatgtgaattacagctcaataaagcagttttttggtgggggaagagagagagagagagaaacaacagagacacagcaaccagtgtatctgtgtgtgaacctgaagggatcctggactggggagaaaagcagccataaaagggatttgggggccaggtatggtggcgcacacctgtaaccctaggctttgagaggttgaggtggaaggatcgcttgagcccaggagttctagaattcacgagctataatggtgtcactgtactgtagcctgaggtacagaacaagaccccatctctctcttttttctttcttaaaaaaaggcattttttgagacaattgaggaatctggagtgtatatattaggcggcattattgaattaatgttttcttaaatatgataatggtattatcattatgtcttcttcctggaagatacattctgaaatatttgcatttaaaacagtaagtcagaaatgtggtttaaaataatctagggggtggagggcaaggggattgggggaggggatgggagcacaaataaaacaagattggacaaaggcaggtaatcgttgggcttaacagatttgtggtaccttattatatattccctctacttttgcaaaggtttgcaaatgcctataataagagtatttgttttaaatttcctttgcctgtgattccagagaactcttcccttccatttattttgtaaaggcctgcccaggggtcaggacaccccacctgggcatctctgcatcaccctgaggcctggcagggggtgataccacacaggaagtgcttggtaaactggagtgggtcattcacaagtgattcagcaggcccccgactccaaatgtcttctcagcccatttcctccccccctgcaaataatctgggtcccatcccttcagcaggtgggatcctgtacaaaacccctcaatggcttcccagtgcagttaggataacccctgagctcctcgtggcaggcctgcgcagactaccccagcctcatttcccaccctccctattcctgctgatttagtaagccacagccacactgggtctctatgcgtaaacacggttcccccttgctgcctccaggcatccacgatgctattccctcccctggaaagctattctttccccacctctttgccaagtgaaacccttgctcatcattccagtcttagaataggtatcttttcttaaggtaccttaattcctgacatttccagcaccaggctaggttctcacagcatccacttcctccagcctttgtcactgctgaaattgcaccattatttatctactgtttctcccacaccagccataaaactccatcaacgcagggctatagatatcacctgtgtctcagtgcctgacaaagaccgaaattgctcaataagaacatgtgttattgaattattgaggtaggtaggaggtggtggagattaaacatctcacctctttctccactttgaactccatgctccaatgggtccctcaagtttccaagcccttcgtcccattctctttcctctctcctgtgtctagagggtcttcctgggaagttcgtgagaagccagaacaattgaaaggtggatcacaaaaaggcccaggcactggtgggcaggaagggaagggacccactaggacgcgattctgcaaaggcagcaagactattagcctttgatctagaaccggaaataccatttgacccagcaatcctattactgagtatacccaaaggaatataagtcattctactataaagacacatgcacacgtgtttattgctacactatttacaacagcaaagacttggaaccaacccaaatgcccatcaatgatagactaaagaaaatgtggcatatatacataatggaatagtatgcagccataaaaaagaatgagttcatgtcctttgtagggacatggatgaagctggaggccatcattctcagcaaacacaggaacagaaaactaaacaccgcatgttctcactcataagtgggagatgaacaatgggaccatatggacaccggtgggggaacatcacacaccaggacctatcggggcgtgggggataagaggagggagagcattaggacaaatacctactgcacgcagggcttaaaatctagatgacaggttgataggtgcaacaaaccaccatggcacatgtgtacctatgtaacaaacctgcacgttctccacatgtatcccagaacttaaagtaaaataaaaaataaaaaaagatgattcgcctttgatccctcgcctctgcccccgaatcaggtgggctgcatttacccagtacctgggccgactgccccagggctgcagaattgaaaccctccactgggtggcaccagatcaccacctcctgtgcccacccatccaggtctccaagggctgagtgaaggagcggggcaggcaccctcaggaactgtggggcacccactatcagtcctccccatgacatagtatggtggggacacgttactggtgtccgtggaaagtccctttccccatcccccgacacccaccccccaaaattcttttttttttttttttttggagatggagtctcgctctgtcgcccaggctggagtgcagtggtgcaatctcggctcactgcaagctccgcctccctggttcatgccattctcctgcctcagcctcccgagtagctgggactacaggtgcccgccaccacgcccggctaattttttgtatttttagtagagacagggtctcacagtgttagccaggatggtctcgatctcctgacctcctgatctgcctgcctcggcctcccaaagtgctgggattacaggcttgagccaccacgaccgccccctccccccaaaattctaatcttcctgatcagcttgctcaaggaggggcagctaagcagggggcggaaagagatcacaaccgggttttgagatctggggctttccagtctaggtttcgtcactgtaaccctgaacatgccactttatccaccccacatgccgcatctcaagtgttcctttgctcatttattcatttattgatgtttaagtgtagttatcatgagtgataactgacagcagggatggtgaatctactcgtctgcatgctggagtggggtctatacctggggaccctttgttggtagagctctctgtaaacaccaaaccttcttaacctatttgtatgtttaactcttggcacctttttggataaccagcctgcaggctcacaaaccaggacaaaaagtagtagctagctgggcgtggtggccggcgcctgcagtcccagctactccagaggctgaggcgggaggattgtttgagcccagcagttccaagctgaggtcacagtgatctacgatcacctccatgaacagccagtgcattccagcaagggcaacacagggacaccctgtttcctaattatttttaacttaaaaaagtagtagcttttatatacaaatgttaccctttcaaagcctaaaagaataacattctacctcctgatcctgggactggtgaacaacgcacgttcgccctctccatatactacatgatttatttttgttaccctgatgacacctcagctcccaaggttaccatccaaaaagagtctgactcaatccgcctgtctttaggcagccactatctacccgggcctgcatctccagagctcgcctctcctgaattccccatactggtacctactttgtagcttttttttttttttttaagtaaaaaattgtatctgccttctataaaagtaaaatgtgttcattttaggaaatttgaaaaataacaacaagtgtaaagaaaataaaatgacccatgatcttagaccaaaggttctcaacttcagcacgattcatgttttcaagttgagcacttctttgctgtggtgtcccatgccttgcgagatactcagcgtcatccctggtgtcacctactagttgccagtagcaccccccctccccaggcgtgacaatccaaacgtctccagacattgtcaaaagtcccaattgatagccatgatctcagacgcagacagagccaccgtacgttttccagttttccttctagtccttcttcctaagtatagataagtatagatttccttctgccaaataagactgactatatatgcaatgtgtgtcctactttttttttactctattttatgttgtgagtactttcccaaattattgcattttcttcagaagcatgcttgctaatggctgcatagtatcactggctaacctccagcgccatcatcccttttacccatcccctgttgcaggacagttaggctgggtctagtgttatggtgctgtaaataatgtgtgagtgaatagccttgcacataaatcagaacccctcaagataccccaagaacagacactagacaagacatccctgtgtcgatggcttataatgcacagtgttaaatcagcttctgagatatcagttataccagtgtccattctttaaaatagatgagtaacaacttcacagtatttcagaagggattatgttttatcagggaagaaagaatgattttgaggatggggagctgtttctcatattcttcctgatgatgcccagggtaacaccagatttctgtcatcgttgctgaaccacatcagaatttaggctgatgtcttccaaaacagtctcaaatcaggagacaaaagtaagtttcacttcaaacaggataacagaatctgtgttgagaaggcaagctgggagctcagcaggaaacatacaaagccacggttgattcatgatgggtgacatgagcagaggagagaaggagaccgataggccagctgtgtgctactgactgctagtccactgctcaggagtggtcctcagacctacagcatcagcgtcacctcggagctggctggaaacccagaacctcagcccccaccctagatctcctggattagaatctgcattttaacaagaggcccagctcactctaagtccatcaaaacataagaagtcctgacatacactgaggttcaaattcttttccagagttaactgaactgaatcgaagcccaacactcagcatcctaacagaacgacttaataacgttcccccaaattaacactcttgtccatgataaagctgagtgtcacatttcagctgattatactaacagccaatgggtctccagatgttgccaaatgtcccttgattaagaaccacggtctcagatgcagacagaaccataatcaatcctccggtttatttttcttccagtcattttttccttatgttaagtatagatttccttcttccagtgactggtacatagaatccactgcacacgcagctactgtcatcatcaacatcatcaatattatcatcatgatcatcatcaatgatcattattgtcatcattttcattatcacctccaggattctggcattttaattcctggaaaaggctgctggagtttggaagcttcattaagaacatcttcttgataatttatgggtagactaaataaggctagtcctcagttttttaggcacagcttcacgcaactagaaaagccgtaagcactgacatcaaggtccagtctaaccactgagtaatcctgtgagcctgcacaggtcacaaaaccagttggagcctcggtgacctcatgcataccttgagttgttactgacgcctaactcacatgtttgcataaacatcaagtaggatggagactgagaaaacagtttggaaatcgtacaacatactcccatttccttccatctcatagctctctctatgctactttatcaaatgagatgatcaaattttactaaattccattctgggtaatctgtccgtgggaggggtagggtagagaaaaggaaaattgtctggcacatccatactcttaaagtggtgagaaacacaggcttcaggtatcaggaatccagaccagagaatggaactctctgtcctaatggtttcaaccccatcaccgtcaacccctcctccaaaccaccctcgacttctagaaaaccaacagaccacaatcatccaaccctctccccatcagggaacactgaaacaacccagacacagcaaccactttctacctgggggcagaactgggctgcagccacctggactcccatgatggactttgtaatgcagtttcctaggcctgcagaagcagtgaccgctatacctccctcaacaggaccccttacctgggaatcaccggtggattttcggacactcatgtgggcagtctctggagggtgcgctggggtccctgatgcgtggtatccattcactgcagggacagagacacggctcagatgctgtgtgggccacagatgggcacccccgcctttcgtccactgcagccccttttcccacctccttccttggctctgagaggtcttgcgtggcgaagaccatccctcaggatctgatcttatctgtatctgcagagctggaaatgggttgaaggcatctctctaatcctcagcacccaaattactgaattcttaggggactgagtttcttttttaacccgagagcaaaaggaatgtgcctaacaggaggggaggtcactatggtccagctgcctttgctacaaataccacatcagttgtagttacaaatgccagtcacgggtccaatctccctccgtagagtcggggcggggggctctccaccaccttccaacaatttccctcagctttcttagtaacttctccaccctcaaactcagagcagcggagtgtgaatatactagaaagaggactggattgactggtcaccgtgaaattaggctctgtcaattaatagtcaggtgatcatatgcacttcattcttgagtcaccgttctcctagaattaaaaatacataatctggcttggagctggggctcatgtctgtaatcccagaactttgtgaggccgaggtgggcggatcatgtgaggtcaggagtttgagaccagcctagccaacatggtgaaaccctgtctctactaaaaatacaaaaaaattagccaggcgtggtggcaggcacctgtaatcccagctactcgggaggctgaggcaggaggatcgcttgaacccaggaggcagaggttgcagtgagctgagattgcaccactgcactccagcctgggcaacaagagcaaaactccatcaaaaaacaaaacaaaacaaaacaaaaaaaacacattatctgaggctctaaaattctacccttataactttatgtctcttgggggacactcactcatgctcccaacacttgctgataaacctgctctccaaggaacagggggagccctgatatgtagtatctgtcgatttctgtgccaaagacactcccagcatggacggtttcaagccccaacgccgctacacgcacgctcctgacatcacgaattcacactgggacccacgtgatctcggttcccaggtggtaccgctcttgtagaaatataactacataagcttagacgagcagcttcgcctcagtgaccctcagcttctgtacctgtaaaatggggataattctacgtattctcctgacctactttgttggtgtgagaatccaacaaagcgataatagcaaaagttataagtagtcataaagcacttcatttaaaaaagggaaggatgaaaggcagggtgcggtagctcacgcctataatcccagtacttcgtgaggtggaggtgggaggatcgcttgagtccaggagttccagaccagcctgggcaacatagtgagaccccatctctatttttaaaaatagaaaaaatttaaaaaaaattaaaaagggaggaatggccagggggcagtggctcatgcctgttatcccagcactttgggaggcagagggaggactgcttgagcctaggagtttaagatcagcccggacaacaccgtgagacctcatctctacaaaatatatatatttttaaattagctgggtgtggtggctcatgtctgtagttccagtaactcgggaggctgaggtgggaggatagcttgagcctggcaggtggaggctgcagtgaactgtgattgtaccactacactccagcccacacttcagagtgtgacaccctgtatcaaaaaagtgggggagcagaggcatccagaaggggaaggtctttgcttttgttcctgaattgagtccccaggaaccacaagcctgcgtgatctcaggagaccaggacgatgcgccatcccgtgacccaggcttcaagtaattgccaataaatatatacaatgcaggtcagactggaggaagatctacacactgatgtccaactcatgattcttctagagaaaactctatagcgtggcaggaagcacaggagaatatggctgaaagttaccaccaacacctactcatttggagcgacgaggactggaggcaagcgttgggcaatgggatgatgaagcccgttccacggagaacccgtctcctgctcaggtggtgccccgttctccaccacttgcagtgaacactccagggccaagcagggccacatgcagctgagtgcctgtgcgcagctgggcttctcccccagctacagggtttaccccccgttccagaataaggtggttgcacacatcccaaggaaatagcaagctgatccacagcaggcccctagtacagtagaagcttgagggaagcaacaagaaacaacaaatccaccctgcagggccagctacaagcctgggccacacccacatccctcaggcagctggccaagtgcagataccatccacccgctatgaaggcagcttaagaggcaaggacaggattccaacagcatcagggaaaatgctgagggggccaaggagaatccactctgactggcatcaagctatgccaggaaagacatgagcctgatgataaatacaccctacaacgagggcatgagagtggagaaattttatcaaatagcatagaactatctgaataaaacacagatgctgaaaaacctaaagacaacagaagaaaacctcaggacactgctttcagtttaggactgattaacagacaaaaacaaggaggataaagaagacccgaataatttaatttaaaaggctgattgaaatagatgtagtaaacatcatatcctacaaacaaagataacatcttctgccaggaagccctggaacatgtaaaaacttggtcacatttaagccacaaataaactatcaataaatggcaaaaggtataaaaaacacaggccacattctttgaccaggaaagcaataaaagtagatattaataatgaaagaataaatatacaagatccccatccccccaactcctaaacacttagaaatgtaagaaactgccctcttaaataatgccagatcaaaaaggaatttaaaactgtaattacacaatatttagaaaataataaagaagaatatatcaaaacaaatgggataaagtctgaagtatacctggaggaaaatccacagccttaattatttcattaccaaacccaaaggaacaaaaataaatggactaaacattcaacttaagatctggggaaaaaattttaaaggccaataacatacgccaaaagaaaacaggagaacggaatagaaaagtggtaacagaaattaacgagtcaggaaacgggagaccattagcaaaccatggctggttctgtgtgtgtgcatcacaacaataaaaacagcagataagccagggtaatttgagagggaaagagaacacaaatgctcagaattagggattagaaagaaaacaatggcacaacaaatatagtagaaacttttttttttttttttgagacggagtcttgcttcatcacccaggctggagtgcagtgggcgatctcggctcactgcgacctccgcctcccgggttcaagtgattctcctgcctcagcctcccgagtagctgggattacaggcgcccgccaccatgcccagctaatttgtgtatttttagtggagacggggtttcactatgttgaccaggctggtctcaaactcctgacctcaagtgatccgccagcctcagcctcccaaagtgctgggattaccggcatgagccaccgtgctgtacttatagtagaaactttttaaatgcaagaacatatgacttataattctgtatcttcaacaccaaaccttccatgagattcaaattatcaaaagggtttcaagagatgccaaaaagaagtgaaacctttgaaaaatgacctccccgcaaaaggcactgcacccagatggtttgatgggcaaattcattcacacactccagaaagacacatccatgcatagaaacatgtggcaggcttccaggtctattttacaaagtcaacatgaccctggtcttaaaatcaaacaatacacaagggaaccatgtttagtctgctttcgaaaatgaaatgcacaagtttttatctgagtaggtaataaatctctatctttgataatgctgagtccccatgaaccaaggttgtcccagctcctgaggagaccctgactccctccctccccagaccctccaaatgcatgcccaggtcctgcctctcctctgccccagtctttccccacacttgcagccgccaggaactgtctaaagaggagacattttgcccctaatccaatcccttgttcccacttcagttctggtctgtcagctgatggctaattactgctcatgtcaaaacaattacgaggaaagaaaacacagttttccattcgaccctttctccccacgtagcagctctcctcggacaccctgtctggctgcgttatcacttgaagtctcccgggcacattcagaatacgtctcagtggagatctagacagttatagcccacaagatcctggcaaccctcacccacggcattcctcattgctattccctgtcctgggggctcccggctcacccagggtcagccacaaaacaaatgaggcgagaagtgggtgcttctggggcctccagcctctgggggaagaaaaatgaaattggtcaaggatcgctcataaagggaacataattcagtctggagatacaaggaaaaaaaaaaagcaaatgtcacactcatctgtttttaagatttttaaaaagggaactaaaagctctatctagttagtaaccttagcagcttcaaatataaataatacacacaggcacccacacacttcatttcccttataggcagttaagcaacttgagagggcttaggaggtgtctaatgagaggaggggacagatatttgggtagaaaagaggagggaggtctgggtagggagaagtcaacagaaacagaaaagaaaggcgaatatgaaaagttatcgagaaaggccaagcaacaaagaagcgccagcagctccgccacccagggctcacccccacccacagctcggcttccatatctcagtaccgatccctgagggaaaaagtcgcatcctcagagccctactctccaggttcctgttccctgaggaacccaaaagaacataagaaaatcagccatgaacactctcttattatacctcctgtaggtctggcctaatttctcctctctctggaataaacatagtaatttcactcctcaaagttaggaaacctggtgactgggagcggtggctcacgcctgaaatcccagcactttgggaggctgaggagggcggatcacttgaggtcaggagctcgtgaccagcctgcctaacatggtgaaaccccatctctactaaaatacaaaaaattagccagggatggtggcgcacgcctgtaatcccagctgcttgggaggctgtggcaggagaattgcttgaacccgggaggtggaggctgcagtgagccaagatcctggcattgcactccagcctgggcaacaagtgcgaaactgtctccaaaacaaaccaaaaaaaacaaagttgaggaaccccggagtgctgaagccctggttcttgaaatcctcgcttccctcttttcctcttcccctctcttcttccctccctcccttcccttcgggcttctttttccttcctcccttccttctacccatcctccttccctccttctttctcacccccccctttttccttccttccacccgttctccttcctcatctatcacatattaaacatagtacagcctaatgtttccccaggtgtgttaaacaggatagcaattctgccagatgtgtattgtaagtgttatgcagtgatagtaaagggtcagtgttacggtccaaagaatttaggacaaacaccccattattcagattgagtttatttacagtaggccttttagaatatgctgacatgcgcttgaaatctcaaacaaggcaacagcatgcagcatccttccgcgcacacagacgcagaacccgttgagggaaatacagcagggctaccgtgaaatccactttgggacacacagtcatggccacagaatgcaaggtttgaagtggggcagttccgtgctcatccggtctgatgacatagggcacaattacagcctccttcctcccaccacatcctggaaggcctcgcaggttccttggtcaccatgctcaccttctcaggaggatccactgtccaccatggcccatttaggggagcagttttacataaatacctttctgttccagaaatttctctctggccacctggtcctcactgtctctcctagttgtctaagatgtgaactgcgttcccaaagacagactgataaaagattttcccacatggttgtgaatagtgaaacacctgtggctgctttccaggacatcagaggttaaacaggcctttgtaaggtcccaggagcctcagccagcaagaacactggttctaggggaacatgcacttcttccagcagaaggtgtcagggccttccctggagtcaggggtgaggtctaagtcagagtgctggggaagctgctttgaacctgagactggctaatttcgcaagaagcgagggtcttcctttgctcctgcaggggagaggagagctgtcccaggcttcctgatctggagaagaaggtgtgggcgagggtgaggctctgggttcaggagccccctccccagagagcccctgctcagaggaagcacagctgcctccctaaccatatccctggccggctcctcaggctcaaaggaaggtcctccttgcccttcagcctctgcaaaggcattcactctctcccctttaatctaggttccctgaggctactggaggcctaaggatgatccctcagtgggctgaagccccaaggctgagcaaagccagatcctgaacccatgtttcctgaaacactcccacaaccgcccaccaggacaacctcaaaaaataatagatttcttttatccttaagaaaaacacgtaagttcaatgcatatcccaggcccagaggctcagaaaggtattcactttccacatttgcactgttgacacaaaagccacagatgcctatttgaatttaaacaaatcaaatttaaataaaatctaaatgcaatatgatttccaggactggatccaagaacagaaaaaggacatgaatggaaaaactcatgacatctgaataaagtctaacattcagttactcgtaatgcacgatgtcaatttcatggttttgacaaatgtaccgtggttatgtaagatgtcaaccgggagaactgagtacagaaggcacaggaagttactgtctttatagcttttctgtaaattaaaaattgttccccaaattttaacaaggtattaaattaatgaaaaattcagctccttggacataccagccccattcaagtactcaagagccacacatggctagtggctaccatattggaaggcacagagaaagaatgcttatactgtcacagagggttctactggacaacactgccctgtactgtcttcattctacccaatgactcatacatgaaactcccagcatctcccttttcactcattttctttctctttgcctgttactatttctctctacaaatcagtatttccacactgcacgttaagcccagcccaaagaggactttcaatatttgcagcagttactgaatggcgtcttaggtgttctgttttggtttaaagtttatttcttactcatgcgggtctcacccagaaagcctggcattaaacacctctagtaaagctactgaataaacacagcttccataactctggtgatattaaaggatggaatgcaggcaaagtccccagcccaggtctgatcctaagtagcacccaacattcaaagactggagtctagtttgtgcgggggtggggaaggggggggttgggggaggactctaggcatgtttctagaactctcttcccagttggcaacctggctgcctctgcttaccagtatccaacaaacctgcactaataagaatgaaccagctctgtgggtggcccttcaaactctctctagaagttaacaaagctacaacacaaaagtaaagctggctgggcatggcggctcatgcctgtaaccccagcactttgggaggctgaggctggaggatcactggattctgagtttgaaaccagcctgggcaatatagtgggatcttgtctctatgaaaaattctttaaaaattagctgggcaaggtggcatgtgcctatagtcccaattaatcgggaggctgaggtgagagaatccctcgagcccaggaggtcaaggctgcagtgagccatgatcacaccactgcactccagcctgggcaacagagcaagaccccacctcaaacaaacaaaataatccaaaagcatgcatggatgggcagggcctcgttttatctctctccaggccctcaagtttatgaatggggaaaatgaggcctggcaaggagaaacatgcccaaggccccagtttaacatttgtaatttcacaaatctaggatgccagtgattgaggccagcagtggctcatgtctgtaatttgggtaattttgggaggatcacttgagaccaggagttcaaaaccagtctgagcaatatggcaaaacactgtttctacagaaaaaaataataataagaagaagaaaataaaataagaaaattagcggggtgtggtggcacacgcctgtagttccagctacttgagaggctgaggcaggaggactgcttgagccctggaggaggaggctgcagtgagctatgatcatgacactgtattccagcctgagtaacagagcaagaccatgtctctaataaactagtatatactattgattgtaagatgcatctgacttccaagatattaatatgtcaggggaaaatgtatgtctcagaatcaatgacacaggactcttcatgctgacgtagggagctgctgcttcttgcttcaatgggccatggtctgggaacccttgagcagcgctgaactgaggctctgggtcactctagaactgagcttccccacctcggcactagtaaacatttagggccaggtgattctttgttgtgaagacttgcctgtgcattgtgggatgttcagcagcagccctggcctctacccactaaatgcctgtagcccctccccccggtgctggcagtcaaaaatatctccagacattgccgaatgtcccctggtaggcaaaaccacccaaaagagggaggaaagcttaacacatatgtggtatgtttcaaacaaagaaacaaagcacaaacgaactgagttaaataggtttcttcatttcaggccttcctgcagtcttcagaatgctaatgtgcctgtccttcttcatcctccttcatggagcacggatacatctgggatcccaaggattccaccttaggaaatactaccccagcaccctggggatgggggcagagggggacaggagttgtcaacacactcagtctagccttggccatgcgggcaattctcatctctatatctgaccttctccacccatctccccacctttctcagccccctttaggggcccagcacacagtgcagcgctggacagagagaggctcttgatgcacctgtagggtaaagaagggagcctgttaaacccaggcctctaagccagggaccggaggcagctcctgtgagcatcccttctgcaggacagcccccatcaacagcagagaggacaagatgctgcctgtggagggtcccaggagagcaggctttggagaagtgaccccatgactcaaagggcaagtctcgaccagcctcaccaacggggcaggctgcgagtcacacgtgctgtctctacacatccgagcctccctctgccggcctccctgtcctgtcctccttcaccgaccactctggctggaaaagacagctgggttacctttttagtgtctggctggcctggagccagccaggaaaaaggacacaccttgcgtcattcgcactggcattttgattgttttaaaaaaaaaaaaaaacacaagaacaacattgaaagagaagccagtgggctcagaactgcctgctgtcacacggcagctacagtacgaacgggcccatttctggggacttggtctgagatggcagcactcactgtctccctaggaaatccgtcacagctgccccatgtccctcccacacagggggttcctttcttatttttttaaaaatttaataatataaatataaataaagtgcttttgaaaacctaaaataatttttgatagaaaacacccaccttcctatcacctctcccacgcctcagctgattttctagaggtaatattttcccatcttttccagttttgagctcttctgctggcaactgtcatatgcctaagcaatatgctttgaatgtgcactttcatgtcttcaggtctcaatgctagacaatatccaaagactccctgctctgaaaggtgaggatctggccactcgctttgcgtcccacctccctcttccgatccagtattccagagtcctgtgattacctttggtccttcctgtggttccctgtgctgcttcaggtaaactatttagaccagggattactttttcttctgaaaactttacacaggctctcacctcccttccacagaagctgaggatgtcacgctcaaggcattggaagattaaattcccagccccaaccacaactttgactttcatgctttgctgccagattgactcctgaagtcgaaaaccaacaagtgtgctccacacaccataggatggtggagacattggtgaattagttcaacacggaagccaggctctgcggactgaggatatcacaaaagaaacagacaaagtccccaccctcagggagcttacagtctagcatgggagagtgaaggtcaactaggaacaggatgatggggacattaaaatagcatgcggctgagatctaaagtgactgcatgagggctcaaaattgagtggtcagggaaggcttcttggaggaggtgacatttttaaaaagccacatgaaaggagatgttgttctccctgctgatgggtcccataacctgccttccagaatctcagacctagatgtctcccaagaggcccctgaacaaacctcccacctattataggaatgtccatttcagccaggcgcggtggctcacacctttaatcccagcactttgagaggccaaaacaggtggatcacttgagaccaggagctcaagaccagcctggccaacatggcgaaatcccgtctctactaaaaatacacaaattagccgggtgtggtggtgcgcacctgcaatcgcagctactcgggaggctggggaacaagaatccattgaacccagaaggggaggttgcagtgagccgagactgcaccactgcactccagcctgggtgacagaatgagaccctgtctcaaaagagaaacaaacaaacaaacaaaaaagaacgtccatctcaactgcctctgcttgattacctttgcagatggggaactcacaccctcaaaaggtctccctcacactgtttcaggtgttttatttgaaagctgccttgtaaacatctacctccttttagcttctactccgtgatgtccacaagagccacatagggtggttctgtccacacttcaggtcttcctgcccctgacagacaggaaagagctctgacacctcacctcccccagccatctcctcccactaagcgcctgaggaggagtgtgcaggaggccaccagagctgctgctggcactgccagggagacaccaacctgcttggcagcaggcctaagggaccctctcccaggcccaacccctccctgggtttgctacatcagccaggtttaagacccaggacccatcatctcagcctctccactgaatgtggcatcagggccctcccagttgccccaaagcagacagcggacattacctgttggaggcagagagctcctgtgagagccagggctggctggaatcccaggagaactgctgggacgttcccaggtggtctctggtgaaagaagagcaaagaaaatcactttgagaatgtcacagggcagaacctgagtttcacagagcagaaggagatgctcagagctggagaaaaagagagacagccaatcgccctcctccccaaccctggccagacaggaccctgctttctgctcccatatccatccatctcccttcctggcccctgcccccttccaccatcccatgaccacagagcttgtttttgctgggggcccttcttgatgaggctggggccagaaggagatggacttcctgttgagatgtcaagatcctctaaaatatcctctgccccaacctgcctcttcattcacccctactttgtctcggggctctggactcttctcctggaaccctgaagttgccaaccaggtatttctccccaaatgtccactgttacctgaaactccaaagcacagaggtgcaggagcctgtaaagagacaggggccctctgccacctggtggtgacttccaagtttcttcctgatttcgcagttctaagtctcatttgagctgtaactgctgaatttgcctggtcacctctctctcttccaatgccctgctacaggctctaatcagaaataaaactggccgggcacagtggctcacaactgtaatcccagcactttgggaggcctaggtgggcagatcacttgaggtcaggagttcgagaccggcctggccaacatggtgaaaccctgtctctactaaaaacacaaaaattagccaggcgtggtggcacgtgcctgtgatcccagctactcaggaggctgaggcaggagaacccttgaacctgggaggcagaggttgcagtgagccgagattgtgccactgcactccagcctgggagacagaatgagactctgcctcaaaaaaaaagaaagaaagaaaggaaagaaaggaaagaaaggaaagaaaggaaagaaagaaagaaagaaagaaagaaagaaagaaagaaagaaagcaaagaaagcaaagaaagagagaaaactaatactgcaagctatagtattgtcccccaaacactactttacccatttcactgccatgagcagagacttcttatgaagttatctagtgataaaaataatactttctcactacatacaatttgataatgcaggaaaacacacaaaaataaatatcacccatcatcccaccattcagaggtcatcaccatcaacattttggtatccatatgttgatttgttttctaagcatatgtttctctttaaaatgagacaaaatcaaactatagattctttttatgtataaatttttgtgaatacctttccaaaatctgtccaggcacagtggttcatgcgtcttatctcaatacttttgggaggctgaggtgggtgaattgcttaaactcaggagtttgagaccagcctgggcaagatggtgaaaccccatctccaccaaaaatacaaaaattagccaggtgtggtagcacgtgcctgtggtcccagctactcaggaggctgagctgggaggattactggagcctgggaagtcgaggctgcagtgagccatgatggcgccactacactccagcctgggtgacagagcaagaccctgtctcaaaaaatgaaaataggccgggcgcggtggctcatgtctgtaatcccagcaatttgggaggccgaggcgggtggatcacttgaggtcaggggttcgagaccaccctgaccaacatggtgaaacccgatctccactaaaaataacaaaaattagctgggcgcgatggtgtgtgcctgtaatccagctactcaggaggctgaagcacgagaatcgcttggtcctgggaggtggaggttgcagtgagctgagaccatgccactgcactccagcctgggtgacagagtgagactccatctcaaaaataaataaacaaataaaataaaaataaattttaaaaactttccaaaatcactgaagggggcggtatagcaaagtagttaggctctgtttagtgtggtgattctagacccagactgcctgggttggaatccagctctgcctctcaccaccactatccttggccaagctacttattctctgtgactccctttcctcctatgtaaaatgagttcaataaggtgtccacccaagggagatactgtaccaataccaaaggcccacatacatgcctctagcgctaagtcatttttaaagttagtctgatatgaggatataacattatttagttaaaaattccattactgaaaattcaattgtttcaaacaataaaaacaaaactgggttcttgactcaactttgctcctaaactaccgtgcagccctaggcaaatcgcaccacccttctggtcctctgatgcttcatccaaaataaagaggttcggctacttggtctcgtaggccccaatactcccgctctctaggtgtgattggtggtctcaaggcccatggtttgggtttcaggaagggtgaacctggactccaggggcaggcataacaggggtaatatggtcccttcatgtcttaagggagagaaaacagaattgagggtgatctggaaagcagagacggtgtgaacataaaccagacagtagtagggtcttttatgaggagtgacaaggagagaggctgccagcaggcttaggagcttctccaagggacccactggctggcaagagcaggaagccttggagaacttacttcaaagaccactgccctgcttagggcccacgtcataagccattcatacgctgagtgacctctggaatcatctgaactctatattctgtttttctcaactataaaatggggatgaaaatggtacctaagtaggctgggaaagagcattaattgggttcacctgtacaaagcacttaggataacatcgggcacatggtatgtgctttctcagcactaaataaaacagacagacaagcccggtggagcttcgatgagcaaaagcagcgaggtgggcatccccaggagcagatgcaccatccagcctcaggctccttcctaggcaggcttctcttctctcctgcccgttgaatcagccctgcctggaggccgcactgttgccttcacatccacagagtcaagaccgggctcccctctccaccctctcctccgagtctcctgggttccctggcccctggacaaccagggacagggctcactcaccatcaccagctccaccctatgtcccatccctcatatctaattggttcccagggcctggagatgcccctccatcacgttcctcttgtcttctccatgtcactccagagccagtctccctgccttttgaaatccgtccactcacagctagtggaccactcaccctagagcccagctttcgccggaggtcacttcacagcgaaaatccctggctagctcctttccaacatggcacacggaatcaattccgaagtccactggcctcctggcaaagtgctccaggatcccaaccctgactgcatccagactgacatcccactggcttcacttcaggcccagttaacttgcctcgccgatctctaaatacgcctttcccgtattgttcacccatacctgccgcctcctgctcccccatccctggatatcacaaccttgttcactcatcaagtctcaactaaaatgtctcttccaccatgcagcctatcaagattgctcttcttccctgcaaagagttcttccccagactctctagagtgggtgctgtagtgcaccacccaaatctctctagctgcagaggctcatagctgagtccctctcagggaaccgcccttagccaaagagagctgccgtgcccaaggctatgcctagagtaggggtgcagggtgcacatctaatgactggggtgagaggggatcaacggcccaccaatccccttgtctcaaatcaaacaattctgaaggcccctcccagctcagagctccccacggcgctgccgaggcctccttggtggccgcattgcaatgctgcttccttccttccccgggggttgctcccaggagcacacaccctactgaaactcctgcatgtaaatctgcctcaagtcttcttgagaacctgacctaagtcctgcaacacacacattccatccagcttttttctaggaaatcagcactttgtccatccctcagacagctcagatcctaaccttgacaccttatctccttgagggtcgaagccacggctggttcgccctctcaaatacggcacctggcctgaaggatgcaaggacagatgggccaacagaaagacggacattgtgacagcacaagagagattcccacctgatgtgctctccaggaataaacagcagggaaaaggtcccagaaaactttccctttgtgctgctgccaccacccctttggtggctgacaccattgaccttattttaaaaggaagtcccaccagctgatgtgcagacaccacctttgatcttctggttggggcagagggtcacaattcatgcactgactactccttccatccttgcacccattcatccatcactgtttgcctactacctgcgagccatcaccaaccactgcggacccaaaataacatctggactattgaacagagaagctgctggtccccgttcctctccccatcccccatccttgagccctccatgaagggaactaccagtacagaggcaatcagaacagcagccagcagctccgggggctgcaggaggctctgaaaccctaggtggacgctggcctgcagtctgaatgctgctgtccatgtggggacccgatgggaggcccctttccctgccctcactggcctggtcaactcccagaccccccacaagctagagtctccgtaagtaccatatccctcccctctaacctccaaatgggccccatcagggacgatgcagctgcctgaaggattcagcccagtccatctccttgtcttggcgagatctgaccaacccataacacaaagacactgtgagcctggggcagggatggtgctgagccaggccaggccaggccaggcagacatctggagagagccactggggctctggctgggtgacctcaccagcagcaggacaagtcaccccagaggaccatactacccacagggaggaagccgtgtccaggtcttttccaatacaagattccctaatctgcttacaacacatctggctccttgaccaagtcacagtaagactgaagcggcagctccaggcctcaagagatgctggattgagacccttctgcattctctggacgtccatccctgtggtcttaggtcatcccggatgactgcccacactctactaacagagccatggccacacaggccccagaggttctaggaggaacagtgcggtcagagtggaagaagtgagatgtgccccggggagcctcttcccaccccacctaattcacacaaaacacatattttcctagtggtaactagaactccattcagacctcttccgctgagacccagagagccatatactggccatggatgaaaccagtctaagggaggtactattttagcattaatgctaagagccaaagatgttaatcttctcctcagcgaatgccagtgtctaccccacatagaataaaacttataaagacagctgggcacagtggcacacgcctgtagtcccagctacttgggaggctgatgcaataggatccaggagttcaagtccagcctggacaacacagcaagaccctatctctataaatgaataaatgaatggatgagtgagtgaatgaataatttgtaaagtgagagaccagttgaaagcttgaagactatgtaaatctgagtttcaaagcacagatgccccttcttcaaaataataataataaattttaaaaacagtgagctaggcggaagttattaattttaaatagtcacttccgggcttcatttccccttgttaaggctgcatcctgcctgcattagcaatattgggctccagtgggaaagccacaaggagcccctggacctaagccactggttatggtgactggccatgggcccacctacaagcctctggcccccagtggcctcctgctggggctcgtccacttttcttggcttgtgccggctctctgctgccccctgtggttatcaggtaaaataaccacagataccagagcagaaggaaatggactctggggtcttgactttgatctgagattcctgcagtcttctcctctttgcctctctttatactcacccttctgtgctacttgctctatctcctcctcccccaccaccaaattttctttcttccttgccctggtttggcggtctctctacccatggcttctctccttgccctgtagtcctcacaaggagggtctgcctagctatggccaggtttttctagtcagatggcagccctgccactccgtttctcagcccttctcccttcctacccagaagctggcttgcccccaggctatgctgccctgtcctccaagcgagccccattgccttggtccaggcagatgcagaatttgcaatcaggccacattctcctggaggcccctgcttatctcccttggccaatacaaaagcagcagttcacagagacctggttccctcctgcgcaccagagtttcctccatctctggtttttcaatgccttccagtacagccattgctacaagacatttgaaattccctcttaaaagtaaatggctgaggcaggagaattgcttgaagccaggaggcggaggttgtggtgagcagagatcgcgtcgttgcactccagcctgggtgacagagcaagactccatctcgaaaaaaaaaattaaatgatatttaaatcacaaccacagtttctctgcaggaaagaaactactctctgaagaaccatttacgcctggtcacgccaagcccctccacatctggcatccccttcagcggtcacaaaacacctatgagataggtgctgtcatttcctttttttttttttttttgagacggagtctcgctctgttgcccagaccggagtacagtggcgcgatatcagctcactgcaagctccgcctcccaggttcccgccattctcctgcctcagcctcctgaagagctgggactacaggagcctgccaccacgcccggctaatttttttgtatttttagtagagacagggtttcaccgtgttagccaggatggtctcgatctcctgacctcatgatccgtctgtctcagcctcccaaagtgctgggactacgcgcccggcccatttccacttttaatggaaggaactgaggcctcagtgagaagtggcatctctggaactcagtctgacaacaaagaccaccattttctggccacactcaccgtgtctgagctctaggctgggactctgggagctgcagcaaaacagtgtattttaatctataaacaaccctttatttgagaatcatcctcaatatgaatattattattattcattcaacacatatttgagggcctattctgtgtcaggcactgtgctggacacggggttatattgcaggaaatataagtggttaaactcctcctccttcagcttaaattctagtggtcattatgccattccatctttagttaattttagacacatgcacatgtgtataaaatgtgtatgtgtataaaattttccataagtgaaaacttaaaaattttctaatgggattgggggagggagttgtgccaggagacaaaaaataagcaaaacatatcaggttagctcttggtacacactaaggagaataaagcaaggaagggggatagaaagtgttatgagaacgaagctgtaatttaagaatggccagggaaggcctcaccaagaaaggaacacagaatgaagatctgagagaaatgtattatgtatctattgttacatcgcaaattacccccaatttaacagttggaaacatcaaacattcattatttcatattgttttagcacatcaggaatcagagagtggcttagctgggcaattgtgcctcaggttcccccatgagcttggggtcaggaagtcagtgggtgctgcctcatttgaaggcttgactggggctggaggagctacttgtaagaaagctcaccctggccgggcatggtggctcacgcctgtaatcccagcactttgggaggcagaggtggacggatcatgaggtcaggagatcaagaccatcctggctaacacggtgaaaccccatctctactaaaaatacaaaaaattagccgggcgtggtggcaggcacctgtagtcccagctcctggggaggctgaggcaggagaatggcatgaacccgggaggcagagcttgcagtgagccgagatcgcaccgctgcacttcagcctgggcgacagagcgagactccatctcaaaaaaaaaagaaaaaagaagaaagctcgccctacggatgctggcaggagccaaagttccttgccacgggctctgcacaatatggctgctgacttcgcccagagcgagcgagccaggggaaagcaaggcaaagggtacaatgtctgttacaacctagtctcaaaagtgacactccatcatgactgccacaatctattagtctcagggaccacccaggagggaaggtagaaagggatgacacaggagtgtatcaggaggtgagtgtgttgggggccatcttggaaggctcctatcacagagggaaggagcaagccacacacatatctgagggaagagaatcccaaatgaagggaacataaaataaaaatgttctgaggcagaagcatgtccttcatcatagagagcagcaaggaggatagtgtggctgaagaggaattgtggggaagggaaaatagaagatgagttcagaggtaatgggggccagattggatcatccagggcagtagttctcaaagtatggttcccggaccagcaacatcagcattatctggaacctgctgggtgccctctgggtgattgtggtatactctaaggtctgagaatccgttattaagagctctggcgctggcatcttacagacagatgttcaaaaatcccagatctattccttttaacaaggaccatgttatttggcctcggtttccctgttgtaaagtacgggatagcagtataggggtcccagcttcctggtgttgaggacaggactcagtgaggtacatacagctcttagcacagtttctgacacagagtaagcactcacagacactaagaacaacaataagacaaaacaaaaaactaaaaccacctccattccttccttcctcttctttgcttcccaacttctaccccagaagctggatccctgcctcacccctccttttgatgcctacaaggagcacatctcccaaaagaggggtgctaggggtgaaggggggctagaatgccttctttagcattgctgcagtgtcaggctatcccttagttaaccagggaaacatcactatgagtggtccccaacttcccactcacagctgcttacaaaattcttagggcagccctacaatcttggtggggagcaggggctcctgtgcccatttcacagatgatacagaaactgtgttactgatgggatgaagcagaggccccgtcagtgtcctggccctttgatatttgccagaaccaagctctggtctggctccagcctgcacagagggcctgtgaaagagcagggccaggaatccaggaatagccaaggaattcgaagggtcgcagggagtagggggtgctgcctggagctgtccaagcctgtctctcaatccccattaggatccctgatctaccagcctccttacagagcgtagacccgtgcaaacacaccgggaatctgtgagcatttaaaagacgatcactgacccaaacttgggttgaagggcaaggaaggttgactgcaatgttggagaaatatgtcttgtcaccgagacaacaggtgctggtaacccactgccagctcacgcatatgactcccatcttatggttgagaaactgagaagacaccttatcgaatccaaagcctggatgctccagatccagaacctaagcacaggtgtttggcaaagctctggtctcatttcccaatccagttactcaccagaactactggagccacttgttagaaatactggtgcccagacctcacacctggagcttctggttgagtaggctgggaggaactcaactcatcatttttatcaagcgatctcagtgactaaccacatgtcgggaaaactagtatagtccatagcaggacggtcacggaacccagccaaggatcaggaggtacctgggcccagacaaaagccccagggagtgggttagacttaggatcaggcaaggtacatggtagcaatgtagagtaatttaaggaaccccccagatgttaccccaaccttctaagagccgcggctttgacatgggtctttgctacctacttgagttcccaggggtgctatatgaattagaagagattgccacaaacccatgagcatgactgagtcctcagagtctttctagaataggtgaagatgaggagaaaggagaaggcacaaaagcagtgagtgctgcagtgagggaagcccggagggaaaaggttccggggagaaggttccagtgtgtgggcacaggcagcaggagtcggggaggtgtttctagcagggcctggcctccttcccaaagtctttttttttttattgtaattttatttattttttttaattaattaatttattattattatactttaagttttagggtacatgtgcacaatgtgcaggttagttacatatgtatacatgtgccatgctggtgcactgcacccaccaactcatcatctagcattaggtatatctcccaatgctatccctcccccctcccccaaccccacaacagtccccagagtgtgatgttccccttcctgtgtccctgtgttctcattgttcaattcccacctatgagtgagaatatgcggtgtttggttttttgtccttgcgatagtttactgagaatgatgatttccagtttcatccatgtccctacaaaggacatgaactcatcattttttatggctgcatagtattccatggtgtatatgtgccacattttcttaatccaatctatcattgttggacatttgggttggttccaagtctttgctattgtgaataatgccgcaataaacatacatgtgcatctgtctttatagcagcatgatttatagtcctttgggtatatacccagtaatgggatggctgggtcaaatggtatttctagttctagatccctgaggaatcgccacactgacttccacaatggttgaactagtttacagtcccaccaacagtgtaaaagtgttcctatttctccacatcctctccagcacctgttgtttcctgactttctaatgattgccattctaactggtgtgagatggtatctcattgtggttttgatttgcatttctctgatggccagtgatggtgaacattttttcatgtgttttttggctgcataaatgtcttcttttgagaagtgtctgttcatgtcctttgcccactttttgatggatgcagaaaaggcctttgacaaaattcaacaacccttcatgctagaaaccctcaataaattaggtattgatgggacgtatttcaaaataataagagctatctatgacaaacccacagccaatatcatgctgaatgggcaaaaactggaagcattccctttgaaaactggcacaagacagggatgccctctctcaccactcctattcaacatagtgttggaagttctggccagggcaattaggcaggagaaggaaataaagggtattcaattaggaaaagaggaagtcaaattgtccctgtttgcagacgacatgattgtatatctagaaaaccccattgtctcagcccaaaatctccttaggctgataagcaacttcagcaaagtctcaggatacaaaatcaatgtacaaaaatcacaagcattcttatacaccaataacagacaaacagagagccaaattatgaatgaactcccactcacaattgcttcaaagagaataaaatacctaggaatccaacttacaagggatgtgaaggacctcttcaaggagaactacaaaccactgctcaaggaaataaaagaggatacaaacaaatggaagaacattccatgctcatgggtaggaagaatcaatatcgtgaaaatggccatactgcccaaggtaatttacagattcaatgccatccccatcaagctaccaatgcctttcttcacagaattggaaaaaactactttaaagttcatatggaaccaaaaaagagcccacatcgccaagtcaatcctaagccaaaagaacaaagctggaggcatcacgctacctgacttcaaactatactataaggctacagtaaccaaaacagcatggtactggtaccaaaacagagatatagatcaatggaacagaacagagccctcagaaataacgccgcatatctacaactacctgatctttgacaaacctgagaaaaacaagcattggggaaaggattccctatttaataaatggtgctgggaaaactggctagccatatgtagaaagctgaaactggatcccttccttacaccttatacaaaaatcaattcaagatggattaaagacttaaacgttagacctaaaaccataaaaaccctagaagaaaacctaggcattaccattcaggacataggcatgggcaaggacttcaggtctaaaacaccaaaagcaatggcaacaaaagccaaaattgacaaatgggatctaattaaactaaagagcttctgcacagcaaaagactaccatcagagtgaacaggcaacctacaaaatgggagaaaattttcacaacctactcacctgacaaagggctaatatccagaatctacaatgaactcaaacaaatttacaagaaaaaaaacaaacaaccccttcccaaagtcttatcttaagcccctgagggccaagtcctgagttagagggcaggaaagacaagtttcaagcaatcctgttcccaggtgtttggagctgacagggaaagtgaggcagccagctattctcaccgtgacgtggcaacggaagagtccaggtggcctaacagtccagtccctgtgctccttgtcaattcattcagactttctgagcactggggagcagcaggggggctcacagtatcgtctctgccctagggagctaacaggctggctggaagaagaatctctttctgcctcagctacatcccctgctttcatacctatccctcccaccagatgtattctgagggttgtgactgtattgaataaatgtggacctgtctcctgggcaccaaggacactcagtaattgataaatgaaggaagactcagctcaaatcaactattagaattatgttcagtaacatggctgatggctgatttttaaagatacatgtgtatatgcatgtagataaaaagaaagataaagagacgagggaaagaccaagaagggggccagggagacagataaagcctctattccctttgtgtggtatgaactacctatcagtgagcagcccagtttaaaaagagcaaagaacatatacaggtgatttacagaaaaaacaattgcaaatgatcaataacaaaaaaaaaaaaaaaagatactcattctcattcaaaattggagaaatacaagttaagactgtaagatactatgttttcacccatggggaaaataacctcctttgtgactgataacccctatctaaccaggatctgcaaaaacaggtgagaatgcctgtctgtgaaaggtaatttggagatatccatcaaaagcccaaatgcacgtgtcttttgacctaacaatagctttaggtgtgcaataatgtaagtatgaaggtattttgtggagcacttttcattagagggaaaagactcttgggaagtgacctaaatgttcaccaacaggggacaatgatgtatcgacagggtggcatcctgtggagctgctgaagtgcatgagtgctggagtgaaaggctccaaaacacactacgtgtacaaaaggttctcactttaacaaaagggcataaataaaatgtctgtgcttgtatatgcaaggcaaatgtgccgaaagaatacacatgaagcatttgatgctggttctttcttaaaaatgaaaccaaagtaagaagactataaccatgctgctataaagacacatgcacacgtacgtttattgtggcactattcacaatagcaaagacttggaaccaagtcaaatgtccaatgatagactggattaagaaaatgtggcacatatacaccatggaatactatgcagccataaaaaaggatgagttcatgtcctttgtagggacatggatgaagctggaaaccatcattctcagcaaactattgcaaggacagaaaaccaaacaccacatgttctcactcataggtgggaattgaacaatgagaacacagggacacaggaaggggaacatcacacacccgggcctgttgtggggtggggggagggggcagggataccattaggagatatgcctaatgttaaatgacgatttaatgggtgcagcacaccaacatggcacatgtatacatatgtaactaacctgtgcacatgtaccctaaaacttaaagtataatttaaaaaaaaaaaaaagactatatatatatgtgtgtgtgtgtgtgtatatatacacacatatatatatattttttattattttttattttttgagacagaggctcgctctgtcgcccaggctgaagtacagtggcgtgatcttggctcactgcaacctccgcctcccaggttcaagcgattctcctgcctcagcctcctgagtagctgggattacagacatgcgccaccacacccaggttcatttttatatttttattagagacagagtttctccatgttggccaggctggtctcgaactcctgatctcaggtgatctgcccacctcggcctcccaaagtgctgggattacaggcatgagccaccgcgccaggccagaagactatatttttatagtatatcccatttgaatctatgagaaatttccatgatagaaaacagacaaaacttggtgtaggaacagagagacagaccaaggggaaaaagaccagaaacagactcagccagactagtttagcgtatggtaaagaggtgcttctcaaggcaatggtgaaaggctgaatcagtcaatgctatttgaacgatgggagaactacttgaaaaatattgaggtaggtccctttctcattcattttcagaaattaaattccatatggcttaatattttaaaggggccgggcgggtgggggcgggggcggtggaaacagtccataagactgctagaagaaaatattaccatcttttattggtaaagaccttttaaagtgtggcctcaaagggcagaaatcacaaaaggaaaagattggcatatttatctattaagtggagttttaaaaatcacagtcagaataataaaacataaaaaatgacaaccatttgctacatctgataacataggaaaaactaaactgtttctcctactctctacccaacatcactcaacacttctgacatcaggtatatgggagttttccccgccatactagccagcaagtctccagcggacacaagcagagtgtcctacaacttaaatcgattctgatactatctacctggagatagcatcagatcccacaggctgaaggctcattcccacaagactactccccacttcagacaccaatcacaagcagcaggttgtcacctacacatctgacagataggctataaatcagggattctgtaactccctccacgggttcgattcctttgcaaaagcagctcactgaactcacggaaacgctttactaacctttacccacttattacacaggctatgacaaaggatacagatgaagaggcagatggaagagatgcacagggccagggatgggggaaggggcacagggcttccatgccctctcctggcaccactccccaggctccatgtggtcagttgaccagaagctctctacaccctgtttttctaggttcttacgggggcttcagtacatagacacgattgatgtcatcactgggaattgataatcagcctctttcctctccccagaggtttgtggggtaggcgctgaagttccaaccttctaagcatgccttggtctttcctgtgaccagctgccatcctgaagctgcctaggggatcccagacacccatcatctcattagcaaacaagagactaacattctggagattccaaggtttatgccagggagctggatggaagaccaaatatatatttcacaatatccaactacacatgttcaagactcttctctaagaactgcccaaatcccagtttggatacacatgctatgggcgtgactacttggctactgctactggacctgccaagagttgtatagaacaggacttggggtggtcctcttccacgatgagtggccacttctgccaaatggctgctgaagaagaaaaggcaagactgcggagagaaagatgcatgaagagaacccagagaaagatcgcgcccgtgatcctagaactttgggaggccaaggtaggtgtcttgagcccaggagctcgagaccagcctgggcaatatagtgagacccctgtctctattttaaaaagtggaaaagacagaaagaaaaaaaggcagaaagacagaaagaaggacagacaaagacagaaagacagaaaaggaaaaggaaaaggaaaagggaagggaagggaaggaaaagaagtagcatcagacatcaccaggtcccacagttaggacaatcaatcttggcacctgattttcccatccttacgcctgcattcctgtgagatgcccccatatccctctaataaatgcccttttttcataagttagtatgagcgggtttctagtcctataacaagacactccctgcccaaggacatccatcaaagcacactgccctgtaaatggcaaacacaggcccagaggccattagactgacatctggaaaattcttcggtgaccatgttgaactgtagctttttaacaggctccaagcagtgcttccataatctctccatggaaaatcataccacacaactgcttcgaaacttctcccataaatggcatttttccgcttatgcatcaactttttgttgctgttttctgagaaactcggcctttattaacttcaattgctcgcataactaatctgtatatagaagactttccagtaaaaggtgtgactttatgtgtataaattatgctaaaggccaggtacggtggctcatgcttgtgatcccagcactttgggaggccgaggcaggtggaacacttgaggtcaggagttcgacaccagcctggccaacatggtgaaaccccgtctctactaaaaatacaaaaattagctgggtgtggtggtgcatgcctgtaatcccacttacttgggaggctgaggcaggagaattgcttgaactggggaggcagaggttgcagtgagccgagattgtgccactgcactctaccctaagtgacagggtaagactttgcctcaaaaaaaaaaaaattatgctcaaaatcactgagtattgcttttcacaggacttgggggaaatagaaagaggtgaggctattctggaaaatagaaatcagcaataatctctcaggtgtggccacaaagccacttgtaaacttgctggattcccaaggaagaggatggccatttagccccacggctccttcaggcacacagaaaaagtccttatcatgaaccagcactgtaaaacatgtatagaaattctgggcaaaaaaagctattctcaaacgtcaaaaatggcattcaggatagagaagatcacacaaaatgaagcagaactaggcagcatcttatagttgaaggaaataaggaaataagattccttgggaaattgcaggaggtttaaaaacctccctgcaaagaggactgaaaacttcatccatgcagaggaatggtaagatgctaggaacaggggcagccttaaaggagcgcttctcaaacgtcagagcgcatcagaatcacttgaaggactggttaaaacagattgcagctgttaggcactgactaagacttggtctgtttcatagacttggtctgtttcatactgagatggtcagtttcaagccagtcctatgatgctgtgtgatataagcatcacagtcctctggaggcagcattaaaatgcaaatttctgggtctcacccctagagtttctgatttagtaggtctggggtagggcctgagaaattgcacatctaacaagttcccaggtaacgctgatgctgctggtctggggaccacacttcgagaaacactggtctagaaggcaacaaagggcagggttttctctgcaccaggtgctacctttatccaggtgttggaggtaggaccctttaaaagaaaggcataagaatcaaaacaacccaccaattactcttgacttgaaagcaccctctgcctgcaccatttcctccaaacgggtggtaatgatgaaaactacagaaatgacatcaggttggtcagagagatctaggaaaagaagagtgaacgcaacagggcagattcactgagagtcatgaaatcagccaggttcccagatactcaggtcgtcatgaaagttccttgagattttcatctctgtctctaaattctgctagtgaagaaagttctgcgtttgcacaccttgttataagaatctactcttcatacgaaagagtggagccagctaggtgggatcgcagcattcaaaaatcaccatgtgcccctggccctttctgttcttccgcttcccaaggctttgcgtctgctctgtcttctccgtacctttctgcagtggcacccatctacccaatcagcacataccatttgtatataccaggagcagaaagcaagcgaagtcttggtctgagacaaggagtcatcatctccttgccttccagcctggcacactccttctccagtggcagagagcacacgggctgggcattgttggatgctccttgtatcatataaaaacaaacaaacaaacaaagccctgggccttttcaggctcaggttcacgttcacacagcttggccctggaacaaacccctgatggccagaacataagaccacttgtttaacgtagcaacaccccaaaatacaactagaagattcgagcaggaaagagggaagaggacacgaataaaaacagaaatctgagaaagatcaagagaaacagaggagcaagagggttatgctagggaatgggaagcaaaagaaagtcttggtgctaagctccagccctctcctctatttcagagaaattatttttatcctacttataaacgtaatacaggtccagggaagaaacactggaaaacagaaaagtaaaaagaggaaataaaaccctccctaatcccatgccttggaaagaagcactgtgaacaagcaccttctccccaacttgatgaggtgtcgtctcactgccgggagacacccagccagcaggaatcggggaaaaaagggaagtggaggcaggagctgagcgctcccctgcagcggccatcagggttgtctctcaggggaaatacagagcctgaaaggttttaaaaactagcccaactctctcttttagagatgggggaattgcaatttcaggattctggaaatgcaaggaagagcttaacataaccaggaaacagcacagctgcaggcaagaccttcagccaagtcctctctggtatggttcagagcagccaagagaaggatcaaaagtatttggaaattaattgttttttaagtccctcttttctgcagcttgtaccaaaaaacaaaaacacataattttaaaaaaatccatctctcttggaactgccaccaagacagctcttctaagcaagagcctgcaccccacattcaccgatggcctggcaaggcaatgggaaaacaagccacccttcctgctgctcatgccacctgaacctcatgccgggtattgaaatgtaggggacagattgcaacctgtttacagcatcctagcggacacgataccactgcttagctatcagtgctcaaagataaccactagtgtggggcgggggaagtgtgtcagtttccagggggctgctataacaaaatgccacattactgggtggcttaaagaacagaaacgtattgttacagttctggaagccagaaatctgaaatcaagatactggcagggttggctccttccaagaatctgtcccaggcctctctcctagcttgtggtggccttgggcattccttggctcgtagatggctttctccctgtgccttcgcagcgtcttccctccatgagtgtctgtctctgagtccacatttcctccttgtgatgaggaccccaacatattggatataggtccactatactccaggaagaccacatctttttatttttttaattatactttaagttctagggtacatgtgcacaacatgcaggtttgttacatatgtatacatgtgccatgttggtgtgctgcacccattaactcatcgtttacattaggtatatctcctaatgctatccctcccccgtccccccatcccacaacaggcccgggtgtgtgatgttcccctccctgtgtccaagtgttctcattgttcaattcccacctatgagtgagaacatgcagtgtttggttttctgtccttgcgatagtttgctgagaatgatggtttccagcttcatccatgtccctacaaaggacatgacctcatccttttttatggctgcatagtattccatggtgtatatgtgccacattttcttaatccagtctatcattgttagacatttggcttggttccaagtctttgctattgtgaatagcgccacaataaacatacgtgtgcatgtgtctttatagcagcatgattcataattctttgggtatatacccagcaataggatggctgggtcaaatggtatttctagttctagatccttgaggaattgccacactggaagaccacatcttaacttgatcatttgcaaagatcttatttccaaataagatcacattcccaggcactggcgaattagaacttggacatcttttgtgggacacaactcaacccgtaacatgaagcagaaggctggggctggctgggggtgataggaggcttggatagaggtccacctaacacctggaagttgatctggggatgagaaagtctggacaaatgagaaacagaggagcctgggggttccgcagcagagaccgcaggtgtctggcatggcccagaggggcagtaaagaaagcacaggatagccatactccaaccacagcacaagtccatgcaggtgttcacccaaagcccatgagtacagtaatattgattatgaaaacagtgacattgtctgtaccagttggaaaactgcttttgctccgaccttcccactccatatgtcaccagccaccaaggccccccatggggtccccacaatctggccaagctttcagagtgggagcaggaccctatcccaacatattactccaatagttcatccctctggcagaccactcaataaatggcttggctttcgactgacctcacagaagcgactcttttggggctgagggtatctttgggcacgcagataggcattaaccacagctggcaagagggcagaagcttcatgccacagaaatatccagggtgcctgctacctgcacagcacggcgcatcatctgtccaaggatgacaagaccctcatgccatctcagtgccccttctgctccccttctgcgccactgggcacagtgctcacagggagtgggcaggtagtaaacaacagcatcctgcatgactaacttctcaccccattttcctcctcctacacctcttggatgagtgctacctactttggaatccaactcagaatgaagtaacaaaaaagctattaccccactccaaggtcttcctccaacaataacaatctcatcgatgggacctcatgccagctttgcatagggaggcaccgtctcaaacactggtgggtgatgagctcgtaggagtggcaactcacagcctcgtagggtgtttagaggtggaaaggactttcagcacaatactcaggcaggaaaggaaatgaactccaacccaaaggaaagtctcattttaacaatctcatatccacttcaggaagcattctgtctttgcaaacaagaagccattcgcattgtgttcgcccacaccacccccgcaagaagccatccaagtggttaattagagcccagcacagggaaggtatttagcaaatacttgttacttgataatcaattcacatggtccttgcccactcacttattagaatataacctacagatcatttcaatgcatactaggagtttcactgactcgctgggacctaaccctttaaaagctcactctggttatgtccatccagacagatcctccctgtagcccaaaacttcccgccgcaccacaggttcccattcccacaccccaccccacaggctccacacaagccccagaatggcagagcttcctgcgctaatgttggacacacataaaagccccagaaaaaaaggcagagtaggatgggttttaagatccctctcgaaactggtgcttcatacctgttgactaataagtctgctcgccctagattttttattctcttgcttggtccccttcataatctctcatttccaacttcattcataaaatgtcttcctaggctgggcacggtggctcgtgcctctaatcccagcattttgggaggccaaggagggcagatcacgaggtcaggagttcaagaccagcctgaccaacatggtgaaatcctgtctctacaaaaaatacaaaaattagccaggtgtggtggcgcatgcctgtaatcccaactactcaggaggctgaggcaggagaatcgcttgaacccgggaggcagaggttgcagtgagctgagatcgcgccattgcactccagcctcggcgacagagcaggacttcatctctctctctcgctctctctctctatatatacatacatatatatacacatatatgtgtgtatgcacgcatacatgcgtgtgtgcacgcatacatgcatgtgtgtgcgtgtgcacgcataccagcatgtgtgcgcgcacgcatgcatgcatgtgtgtgcgcacgcatgcatgtatgtgtatgtgcacgcatgcatgtgtgtgcatgtgcgcgtgtgcatgtatgtgtatgtgcgcgcatgcatgtgtgtgcacacatacatgtatgtatatgtatatacatgcatacatgtatatacacatatatacacacacatatatatatacacacacacacacacacatatatatatatatcttcctgactttgtgtctgatgccaccctcacccgcaatacttgatgtaaaatcaccaggcaccctcttttcatcgggcccaaactcagacacccacagaactaaacacggaaaacacatgcatgaagcccagttgagtattaaaaaaaatggcaggtagtggtaaccttctcagccccaaccagctgtgttcatgcaggaaggtggggctggtggggccacacctcacgattttctgaaagaagatagatatccagatgtttacgaaaaaaactcccaatttttcaatgttgaaaactaacaacatttttaagcactgtgttcacagaatggaagcttctgttgacagtctctagtctaatgacaatccagcaagtgacatctaccctccctgtgtctttgcaagacagctctcctggattccagaggtcctgaccttgcctgcctgccacctccctgccatccccaaaacattataatgccatttccctaggagtccagtaatcacagaccagcacttttcaaaaagagttcaaatcaagcaaaagtcattcctgataggtacacaatgcacagtggacctgtacttcctttggcctgtaattaacgagtactggttgatctaatgactggtagagatcctgctatgggattagtgcctggactccactaagccactgggctctgccatgtaatgaatggtaaagagacaagtgactacaggccagcacactcatcctaaccaaagtagaggcaaattaggatgccccagtctaaagatctccatagaagagaaaaatgaaagaagaaactttacaactcctccaaacctccaaggcctgaactgctgcacacgagactctaggttccttgaaggcaggaatgctgttcatcttgtccggatgccagggtgctaagcagaatgtacaaatgaaaacagtacaagccccagattctttttttttttttttttttttttttttttttgagacagagtctcactctgttgcccaggctggagtgcagtggcgcgatctcggctcactgcaagctccacctcctgggtccatgccattctcctgcctcagcctcccgagtagctgggactacaggcgcctgccaccatgcccggctaattttttgtatttttagtagagatggggtttcaccatgttagccggcatggtctcgatctcctgacctcgtgatccacctgcctcggcctcccaaagtgctgggattacaggcgcgagccaccgtgcccggccgccccaaattctttgacttagcctcagctaagttgaaagcagagtgcatgcgtatttttttttaatagcaaaaatgctgagatccaaacaatttttgagctattgaccttaaagctttgaaattataagacctgccattacatcctcttatacagacaggaataaaggctggaaaatatacacaagtcagccacgctgatgacacttaagaatataaacactggccaggtgaagggcctttcttggcagttttatactcattctaagtcttgtcaccataaaattgagttgtttgtcttcaatagctccaccatgagattctacaattgtttatgattatataacctttaaccttggggctacgatacatgtttacctatttaaagaagttgtgttttctcattaaatttctataagaggaaattggatttaaatttgttcttcaacttaatcatatttgactatgcctccaccattttattattacacagtgtccttgcaaataaaaataggtggtgactgttagaaaactttgaaaaatataaagttgacattttttctctttccaaatagattctgaaggtctgtgatagaatctgcgtattgttttgttttttaaacaaactcaatttccgaggtatttctgacacccaccaaagtttggcaatcagacagaaagactccctaaccaagacgtctaaagaatggtttctaggccgggcacggtggctcatgcctgtattcccagcactttgagagggtgaggctggtggatcacctgaggtcaggagtttgagaccagtctggccaacatggtgaaatcccatctctactaaaaatacaaaattagccaggcgtggtggtgggcacctgtaatcccagctactcgggaggctgaggcaggagaaatcccttagaacccgggaggcagaggttgcagtgagctgagatcgcaccactgcactccagcctgggagacacagcaagattctgtctcaaaaaaaaaaaaaaaaaaaaaaaaagaacagtttctaaaggatgccaagaaagtcataaacgcccaccatgcccacacaagcctgtttttaatgacacttttattgcaatataattcacatatcattatattctccctctaaaagcatataatataatggtttttggtgtagttgcagagttgtataacctgcaccactacctaattttaaaacatttttattgtctcaaaaagaaaccctgtacccatcagcagtcactcgccattaattccagctcccccccgcaaccaccagggtggttttctgtggatttctctattctaggcgtttcatataaacagaatcatatggcacacggctttttgtgtctagcttctttgacttactgtgatgttttcaaggttcatccacgttgtagcatgtatcagccagcaccttcattcctttttatggctgaataatataccattgtatggctaaaaccacattttgtttatccattcatcagttgatgggcattttggttgctgctggccataataaataatgctcctctgaactgagcatgcatgcacactttttgtgtggacgtgtgtttctaattttcttgggtatacagctaggagtggaatattctgggtcactgaatattctagaagatttctggatcctattctacacatttgtttttgttccacttccatatctgaaccacatgctgctaatcactgactccagctaacagacagtgaggaacgctctcacactgtttaccagtaaacagtcttgcaaagtaactcaacttcctagaatagagcaaacaacaaaatctgtctcttttgtctttttacttgtgtgggtcttcaacttcatactagcagtgtgactgactttaagccacttggcatttgccacaaatgggagattattggccttaaacactggtgaaaaatgaggggtgtgttatgcacgtaagtattacctaaacattacatgttagaacggatatcctggaagagaaaacaaaacccacaccaaagcggattaataggaagctttaagctctaacagccttccactaagaatccattaaagaaaaataataaagccaaaattaggctttatataaattaggctggcgctctctctctctctctctcacacacacacgcacacacgcacacgcacgcaaccctaatttaatcaaccaaatgtaccacatgcacatctttttagtctcacatttgctcaacacagatggacagaaaaaaatagatgtatgtttttgggtacagaaccttctcagaggaacttttattaacacggaattatcagggccattcattctatttggggagttagaaaaggatccaattatttgtaacaaagaaaagttaaaagtgttctactggggccgggcgcggtggctcacgcctgtaatcccagcactttgggaggccgaggcgggcggatcacgaggtcaggagatcgagaccatcccggctaaaacggtgaaaccccgtctctactaaaaatacaaaaaaattagccgggcgtagtggcgggcgcctgtagtcccagctacttgggaggctgaggcaggagaatggcgtgaacccgggaggcggagcttgcagtgagccgagatcccgccactgcactccagtctgggcgacagagcgagactccgtcaaaaaaaaaaaaaaaaaagtgttctactggaaaacttatccagaaactcacattagttcctggcataataaagttaaatgggaatccactcatttaaagaaaaattaaagcaagaaatcaagaaaattactatttggcaaaggaatccaaaagctcacatcctggtttagtcctccaagcttcgctcacaaacataacacatttatagatatagatctataaatctatagagcttaaaagcctgagtgtggtactcatgcctgtaatcccaacattttgggaggccaagataggaggattgcttgagcccggagttcaagaccagcctgggcaatatagcaagaccccttctcaaaaaaaaaaaaaaaaaaccaaacaaaaaataaaacacttttttttttccagtagcctggtgtggtgacatatgcccatggtcccagctacttggaaggctaaggtggaaggattacttgagcccaggaagtcaactaaaaaaataaaataaaataaaaaagcttaaaaacaattttcaactctcctggacttgggttcatgctttaaaaagatgcataggtttcccttaaaaaattgttatttcagattatttttctttatctactaatccacaaactcagttattctcattccaacttaagtcactgccacccatgcccattcctccaaatactgaggcaaaaaagaaaagattagaagactgggcagtctggtcacagcttggcttataaatgaccagatagcttggatcaagtccctttaccatgcagggacttcatttctatatatgtaaaacaaacaggttctatttctttttttttttctttcttttttgggggggcgtctccctctgttgcccaggctggagtgcagtggcgtgatcttggctcactgcaagctccacctcctgggttcacgccattctcctgcctcagcctcccgagtagctgggacttacaggcacccgccaccacgccgggctaaatttttgtgtttttttagtagagacagggtttcaccgtgttagccaggatggtcttgatctcctgacctggtgatccgcccgcctcagcctcccaaagtgctgggtttacaggcatgagccaccgcgcccagcctgattctatttcttaaaccaggtattgtcaaactttttctgttaagggtcagagagtaaatattttcactttgtgagccacgtggtctctgctgcaactacagataccctcaacttatgacagggctatatactgagaaacccattgtaacttgcaaatattgtatgtcaaaaatgcatgtattacacctaaactactgaatactatagcttcgcctcacctaccttagacgtgcccagaacacttccgttagcctacagttgggcaaaatcatctatcataaagcctattttgtagtgaagtgttatacatctcttgtaatttattgaatactgaactaaagtacagtttctagtgaatgagtatcacttttacaccaagtcagatcgttaagtccaaccattttaagttggagacagcttgtactcagctctacaatctccgtgcaaaaccagccatagacaatatgtaaacaaaagggcatggctgtgttccaataaagaaagcttcatttacaaaaacagctgtgagttgaatttggcccataggccacagtttgccaacccctgagttagaggatttagaagtttcctcctaggatgattatgaagcaaaatcactagcctctgcaacccacttttatgaaagatcaagttatcaaggtctgagggtggaaacagatgttcaccacagcactcagttctaggagagtctctgcctagggacacaggcactggactcttcatagttccatcaacagccaccttctgttttgcttggtacctcactcatgctctgctgaccactgccttgggcttggatgaagcatcactctgcatggtggaatctggctttctgagagcttggtaggagtcagatggtacaaaccaaatgtgtagggaaatagctgtgcaaggggaggggcttggccagtgtgaaataggagacaagacagaggtgagtagataaaacatctctgctttcctgcagactactccaggctacggctcctccttgcagcccttccagaagtgaacatatccactaagtgaccggctgggactctgcatttcactgtcaaacaccagccagcatcacttggcattgttctttggctttccttcccttgcatacctaccctcaccactttgtactgatacctcctaaataaggtgttaacactcaatccttgcatcaggctctgctttatagtgggggagaaagggttaagataccatctcaaggccgggtgcggtggctcatgcctgtaatcccagcactttgggaggccgaggcgggtggatcacctgaggtcggaagttcgagaccagcctgaccaacatggagaaaccccgtctctactaaaaatacaaaattagccaggcgtggtggcacatgcctgtggtcccagctactagggaggctgaggcaggagaatcgcttgaacctgggaggtggaggttgtgtgggccgagattgcaccattgcactccagcttgggcaacaagagtgaaactccatctcaaaaaaaaaaaaaacaaaagataccatctcaaatggtactctttgtttaaaaaaaaagaatggcacagataaaactactggatttagagtataaaaagattaataaataagaagtaaaatcttgactaatacattaaactaaactaatcttggccatctatctatactggcttcaaatatccctaatgtccaaatggtaaaatgtatcctaaacatatctaaaaggtcagcatctctccaaaaagagggcctgaatacctatgactatattaagtgaagaagcatgcatgcctggccttccagttatatttttattttatttatttatttgagacagtggcttgctctgtcacccaggctggagagcaatggtgtgatttcggttcattgcaacctctgcctcctgggctcaagtgatccttccacctcagcctcccaagtagctgggactacaggtgtgcgccaccacacccggctaatttttgtatttttaatagagacggggtttcaccatggtccccaggctggtcttgagctcctgggctcaagtgatctgcccacctcggcttcccaaagtgctggattacaggtgagagccaccacacccagccgacctttcaatcataaatggagcaaaaaatgttgtgctatatctcttgaaatataattatttgttgtataaataagaggtccctgtcgtggtctgaatgtttgtgtcccctccaaattcacgtgttgaaacctaattccccatgtgccagtatgaagcggcggcacttttaggaggtgactaagtcatgcaggctccaccatcatggggttagtgccattaaaagagaaacccaggcagggcgcggtggctcacgcctgtaatcccagcaccttgggaggccgaggcaggtgaatcacgagatcaggagatcgagaccatcctggctaacactgtgaaaccccgtctctactaaaaaatacaaaaaattagccgggcgtggtggcgggcacttatagttccagctactcgggaggccgaggcaggagaatcgcttgaatccaggagatggaggttgcagtgagccgagatcgtgccactgcactccagcctgggtgacagaccgagactctgtctcaaaaaaaaaaaaaaaaaaattaaaaaaagagaaacccagaggatcttgtttgtcctttccaccacgtcagaatgcagctgttcttatgaaccagaaagcaggcccacacccgacaccaaatctgccagcaccttgatcctggacttcccatcctcctgaactgtgataaataaatttccattgtttataagtcatccagtctatggctttttgttagtgcagcctgcacagactaagacagtctccttaacactagctgaggtccctggatggggtaggctattgataatagctcactatcccaaaccgttagcaacacaggcaacttttggtgggaatggagagcttccctggacagcacaagacaagcaatttcctgataccaaaaccctgggagttcctggggctgaactgaaggccactctgcatgatgaaatttccagagagccacaagaaagatggggacttcccaaagtccacggagcatgctctgatggcattggcaagtttatatgaaagcaacggcattactgcattaaccactgaaacttcctgttagccatctggcccaacgccgtttactaaataatccatgctttccccagtgatttaaaacaacactcttatcataaacctgatctatatttcagtctgtccctgactacccctccctatctattctcccttgcctttgatgacattaccttctcctggattccttgtatctctgacaattccttcaaggtctccttggctgctgccttacacctgtgctgcaaggccccgggtgatcttctacatcctcatcacttcacctctctgctgatgaaacacaaatcctgggccaccctctgtggctgggcaggttggtcactgcgcaacagtggccaggccatgtacccacatggctcaccaagttcccatctctagctcagaagtcctctaagtcacaccgtagccatccaaatgccagccatctctcccagaacgcaccccagggaaccacacactcagcatggactcatttttctttcttcctaacctgttcctcccttgaataccctatactcactgtatggtcccatcacacaaggcagaaaacccggaggaatccaggcacttccaatccctgacctgccacagccacatcctgtctgacagattctacctcctcctctccagccactgctgtagaattggtgtttgacctcattatttctcctctcatttagtctgtcggcctccacgcttaccggccttaaagccttcgctctgccgcacaagcagccttgccacaatattctgatcatgtcacgccaccgcctggaaatttcccatggattcccgctgcctacaggataaagacctgactcctcaaaatgccccaaggcccctgactctctctctcacctctttcttccttaaccaatgccaaacacatccgctgtttttctctcctgcctggtctttactcatgctgtaaccttggcttggaatgcctgagtcaaggccgccccctccccctgcaaagacttggttaatacccagatcaagctgactactcccttcctcgagcccccagatttccacacgaatacctgtaacacttataggtttatatgtgtctctggccctattagaactgcaggttctgagatcacagacagcatctagtttgattttggatccccagagcccggctcagtggctagcacagtgacaacctcatccataaaatcctaaatggatgtgaaaataagcagattagccagccaggtgcggtgactcacgcctgtaatcccagcactttgggaggctgaggaggggtggatcatgaggtcaggaaatcaagaccatgctggccaacatggtgaaaccctgtctctactaaaaatacaaaaaaatagctgggtgtggtggcgcatgtctgtaatcccagctactcaggaggctgaggcaagagaatcgcttgaaccggggaggcggaggtttcagtgagccgagatcgcaccactgcactccagtctggcgacagagcgagactctgtctcaaaaaaaaaagaaaagaaaagaaaagaagcagattagccaaggcaaggtaatacaaatgtaaattagactttcaactggttataggtgtaaaaatggggacagaacacctattatccccaggcaccctctggaaaagaagagattagggattaagggagaaagactagaagcgtctggaagaaaggtagacagacaaagaggaagagaagaatggcctgcttagaaccgggactgcactttctgggcactgggctagcatgtggatgaaatgccacctggagagcgacagagcaaagatgcttaagcaaggggccaggcagaaaggcagatagatgcagctggcccagcagtgaggaggcacaagctcaggtgcctccaggagtcaggaggtaagaaaaacatgagtggctattctcatagatgccttcctgcagaaaggcaggcagattaaaatatatttaaaacatccctacagccaaacaaaacaagtctaagaaacgattccagaggagaatcagaaagatagctgctttccttctcccttagactgccgagcaaaattattaatatgatgttcatgggctgcatgatccctacaaacacagctgactctttgccatcagtaagacactccccatcccctagcccttccttacccttcccatcctgcagcttccttctccaggaagcctcccctgattccccagggtctctctgtgacatgctcttaaaacaccctggactcctgcttcacaaccctttcctgattgatcaaataggttttcacttaaaatctgttcccactataagaagataaacacttgcagggcagagactttgttcttattaaatccccagtatcccaagactcactctgcctggtacatatttgaggctcaaactatgtgttgaaggaatgattcaatcaaacagataaacaataagttaaggtcgggcacggtggctcacgcctgtaatgccagtactttgggaggccgaggcaggcggatcacaaggccaggagatcgagaccaccctggctaacacggtgaaaccccatctctactaaaaatacaaaaaattagccaggtgtggtggcaggcacctgtagtcccagatacttgggaggctgaggcaggagaatggcatgaacccgggaggcggagcttgcagtgagccgagatcgcgccactgcagtccagcctgggtgaaagagcgagactccgtctcaaaaaaaaaaaaaaaaaaagagttaaacaagtaatgaataaaactggcatatatctagaatgtaagaccaaggtaggtgctggaattatttttagcataaaagaggagagagccgagcacggtggctcatgcctataatctcagcactttgggaagcagaagtagaagccagaagttcgggatcagcctaggcaacatactgaaaccctgtctctaccaaaaaaaaaaaaaaaaaaaaaacaaaacaaaaaaaactgtttttaggcatagtgtaatcccaacactgtggaaggtcaaggccagtagattacttgaggccaagaattcaagaccagcctgggtaacatggcaaaacatctctacaaaaaataataataataataataataataataataataataataataatacaaaaagccaggtgtggtggcacatgcctgtaatcccagctactcaggaggctgaggtgggagggtcacttaagcccaggaagttaacgctgcagtgagccatgatcgtgccactgcactctagcctgggcaacagagtgagaccctgtctcaaataaataaaaaatataaaaaaataaagaaatcagccgggcgtgatgacacatgcctgcaatcccagctactcagggggctgagatgggaggagtgtttgagcccaggaggttgaggctgcagtgagccatgattgtgccactgtactctagcctgggcaacagagtgagaccctgtctaaaaaaataaataaataaataaataaataaataaataaataaataaataaagagaggaagggcaaataggacaagtccttgtggagccaacagacagcctgaagcagggaccagcagctatggtccaagggaccaactggtcaaaccaactatcatatggcccagtgaacttgccaacgaaaatcatcttccacttttttttttttttttccttgagacagacggagtcttgctctgtcaccaggctggagtgcaatggcgtgatctcggctcactgcaacttccacctcacgcgttcaagcgattctcctgcctcagcctcccgggtagctgggactacaggcgcccgccaccacacccggataattttgatatttttagtagagacggggtttcaccatgttggtcaggcttgtctggaactcctgacctcaagtgatccacctgcctcggcctcccaaagtgctgggattacaggcatgagccaccatgcctggccagaacgatgatattttataacacacacaagtcatctgaaattcctattttcggatccatagataaagtcttattggaacacagctacactcatttgtttacctatcatccagggctgctttcatgctgaaacagtaaagctgagtggctgggatggagaccatgtgaccctcaaagcctacatactgactacttggccctttacagaaaaagttcactgacccctggcctggagcctctgtgggatcacaatatctcaggacccataagaaagctgtcaccagtggcatctgctaaagtctgagtcccagaaaaaagctgccagacactgtctattgatataaaatatgacttaaattaatagagtgcaggtgaaattaatagcatacccatgcgatggattactacacagctgtttaaaagaatgggttagactgaaatgtacaaagtatagaaagatgtccacatacactgtcaaagtaacttaaaggacaacatagacaatattttccaatttattttaaaagaataagtatacatatgtttaaaaggtgagaccggggattattttttatttgaaatcattttgtacttactgaattttttaccgtgaaaacaaactagtctctaacttaaaaaaagataaagatgctgaaattcagaaagccatttccccccatgcccctttgcaatagagtagcttatttgggacaataacggatccaaattattcatatcccctagcaacctgaccttccaataatttggatccaatgttgtcccaaataattgatgatctcatgatcctacggtccaaattctgtgtttggcagatgggtgttgcatacatagacacactctcctctgaaatttcaagtctccggtaacagtgcaaagctgttcatgtgtttgttttgaggaagtgtaagattagaacggtcagaaatagtcctacttcccttttcctagaaacttcattacctcttgcgctagaacacccctcttgagcctgtggaaggtcaggttgccaggggatacgaataaaccagctgccttctttgtgtctctgctaaacagtagctggctcccctgtcactaggaccccctcctggtgcaggcttataaacatcagctgtagtaacgatacccccaggtgggaaggggtggtcatgtagtcaggcaggcacagaggagtgagaggccaaggctgagccagcagtggacttgggtacgattttcatcttttgccttggaacgcatgtctgtgattcccactaaatctaactttccttggtttaaatcctctcagttctctcatggcaatttctctggggagtcacggaggtcaagacacagctctgttcagctggtttaccctgtcctgccctgcccaagaccacagcctgcaacagtgccctttgctcaccttgttacagaacctgccacgtggtgcatccccttttataaaccatccacagcaaacttctggggatcctggggtcatttgaaggcctgggaggtccctaattattggggtcattgaggtgtggtcctattcaactcagatgcacatggaacctgtactatttgatgggataaataacccataagcacccccggcatttcccaaaaaacatctggagaaatgccagccagtgagatacttaaggaaaaagatgacgttgtagtgaaattagggaaacctcgcatttgcaacccctgtattgaagcttcaagatcattaaaaccttcaaaattccaagacatcatgcagtgactttgcctcgttcattttattcaagccagctgttgaccatagaaccttttgagacacccttcagaaaacccagccccagacgaacaggttgggtttaacacagatacccagggtggacgtcagggtccaaggaagactcaaaccataaagggcagccttccttccaagatactcccagaactacagacccagacttgcacccctaccacccagcacagtgggaggagtaagactttactgtagcccctgagcatagacttaagaagaaaaaacccccaaacagagaggcgaagaagggagaaaaaacgtgcccctctagagagccagaatgccagggggttggtgcaggattctcccccgagcgggactcaccattggtggtcgtgttgacatagtaccgccggccctgaggcgacaggtagctctgccagccaggtggaaggatgaccgtctggctttcttctcccggcggaggggggaccattccaggcttctgttggagaagaaagaaaaggtcacacccatttggcatttttgcaagagtttttaaaccaggaaggcaaaggctgatgaattcaccctacagtagcgtgacattgggaagtctgcggcccataaacccctgaggtcagaggcagcacacacgtgacctccggggttgcgtgagcatgagcagtgagaagcacctgagcattcagagcccctgcacagaggacagctcctctgggagcagagaggaaaatgccattcagctaatggagctagactttctccacggccccctagaaaatcactcacggggtgctgagcttgcaagggggccctgtcactccaccacctcccattgtgaaatctgaagcctgaaattcccagaccacgaagcacagcagcagacaaggccccaggcttgctgtgcaaacctagcagaagtaattaatgcaagtcatcccacagccagatgcaaaacattctataataatgctgagaatccatgaagagctggatggagcttctctcgccaagggtccagatcactctggcaaaaagaacgaggactcggagacagagcagacgctgacttcccattgtatgcatttatgtgcaattaattcttttaaccatgtatagaattacttttcgttaaaaaacaaatcagagaaaaatgtatatgacatacaaagaaactagatatctagtagacagatgctaaaaaaaaaacaaccatggccgggcgcagtggctcacgtctgtaatcccagcactttgggaggccgaggcgggcggattgcctaagctcaggagttcgcgaccagcctgggcaacacggtgaaaccccacctctactaaaaatacaaaaaattagctaggcgtggtggtgtgcgcctgtagtcctagctactcgggaggctgaggcaagagaattgcttgaacctaggaggcggaggttgcagtgagcagagatcgcaccactgcactccagcctgggtgacagagtgagagtccatctcaaaacaaacaaacaaaaatataaaaacaaacaaacaaaaaacagccacgatccctgggtgctgggattacaggcaattattatactctcctttctacatatctgttccccctaaattttctcccataaacacagaaataaaagttgttagctaaagaacattttaaaattaggacagagagtccaaattagcccgtaagattgctgtgccttttgaagtaaattgattaaaatcagaattgtagccatacgaagagagtagccatgaatttctcagcaaagccaggggactgttcacaaacagtaaaggtaatcggctcccaaatgtcctcagtatcccccagctgtgcccatagtggtggtccctggtgacccccgcttaggaaaacaagataacagaatgaaagagagcagcagagacacacagctcccaggctactctcacgctttgtgaaggttgcaaaaccacgtgccgtggcttcccgtagtgccctgcatgtcattggagggaacgagtaaatctgagctgctcggggactttgagtaaacacagcctcccttctgccctctgcgtagctgcggtgtaagtttcacaatgcattttcacaacttaattaaaagctttcccctatgccctggacgctccatctcctacacctgctaacctgcagtgcccgtttgattccgtatggaagactgtcttctaagacagcaggagacagtgaggtggacagcagccaggatcaacacggtgtggcatcccaccagggtcgcaggttgctgtctcaccagcatgtccagtaagcacaagcccacatctgggcaggtttacctgggccctctcactgctttggactctccaggattggaagatagccaaaatatatgcaagacaaataggattataacaacgtgcatgtgtgcgtgtgtgtgcgtgtgcatgcgcgcgtgcatgttgagagaaagagaagtatcccatgcacaggagatgaacattctgtccaataggattagaaataaagtcggcatgggtggggggtcaggggattaaaactgagggttagggccaggtgcaatgtctcacgcttgtaatcctagcactttgggaggccgaggtggaagaatggcttgagcccaggagtttgagaccagcctgggcaacataggaagactccgtctgcaaataatttttaaaattagccgggtgtggtggcatacgcctgtggtcccagctacttaggaggctgaggtggaaggattgcctgagcctaggaggttgttgcagtgagctgtgatcgcaccactgcactccagcctgggtgacagagtgagaccctgtctcaaaacaaagaacaaaaaaatacaactacaggcatgagtgtttgatgaaagagattctagaaccagaggggcaagatgccaggtgtcctccccttgagtgaaatattctagtttctccttcaatcaaacatgggaaagccatattggtacttatccaaataacttgggaggaaataggaaggatcaaatattgacatggtcagaaaaggggtgcaggagacaggaacccacaggcacagcgaaaacagccctcaggctcaaacagccttcagtgccaatcctgcctggaccgcttgacagccatgtgaccacaggctactgactcaccaggctattctcgaatctgtgaaacgaagggtgataatatgagcccagttgtggaagacgacggagagggtaacaatacgtaactcagcacctagggcagcgcctgtcctgagggatgcgcaatgaatggggttttccactggaagggcttcacacagtccgtctacggcgatacggacctccaccctagcctcaccatccctctgtctgaaatgtcagcatcaacagtcacttctctgaggtttctgtttccaatactacccgacttgaacggcaaacacctgctggggaggttaacagcctgagagctggccagtgcgttctggtgagagggctgggcagtgaggagaccactccttacaggagctggagagccagtggacccaacctgtgaacctcagtgtcccacccaggaaagagcaataatgatgccgtcccttctccgcaaggcactgatgaccacgaggtctcccgcaacgaggaaattcaggaccttacagaaggtgggaggcaccctgatactgagccgtgaagggccatgagatgctgaaagaggtggggaggagggcactggggccaccaggcccatctcctaatgtggctgatgtggcaaagatggtctccacatctccctcctgcagggccgcactctgcctccatctcccgaggcagccacagtcccatcacctttctgttctcttagaaaggagttcctcctgatggctgactttaaaagtcaaaagacatggagacaaccaggtatagacacaaacacctagaaacaagcagtcagacaaaaattggtacatggatgctcacagcaatatcattcgtaatggccaaaaagtagaaacaactcaaatcccccatcaacagatggatggatagtgtagtacagccatacaatggaatattattcagaaattaaaaaaaaaaatggagccgtgatacatgctacaacatggataaaccttgaatacattatgctaagtgaaaggagccagacacaaaagaccacatattgtatgatttcatgcatatgaaatgcccagaatgggcagagccatagagacagaaacagatttgtcttttccagaggcctggggaggggagaatgggtacacgttttccctttggggtaatgacactgttccggaactggatcgtggtaatggttgcacaatatcatgaatacataaatatatcactgatggtaaatattttgtcatgtgtattgtaccacaattaaaaaaaaattttttggctgggcacggtggctcacacctgtaatcccagcactttgggaggccaaggtgggtggattacctgaggtcaggagttcgagaccagcctggccaacctggtgaaaccctgcatctactaaaaatacaaaaattagctgggcatggtggcaggtgcctgtaatcccagctactcaggaggctgaggcaggaaaatcacttgaacctgggaggcggaggttgccgtgagccaagactgcgccattgtactccagcctgggtgacagagtgagactctgtttcaaaaataaagaaaaaataaaaaaataaaaaaacttttttctgccttctgcgaaggcagaagttagaccttcctaccttcaagtcttcacttaagggccaacagcaccagcattacctcacccttcatggccacagaggggcaagagcagccggcccccaggcatccagaggacacagtgtgcataaccacccaataattaaggtctctctcaatcttattcttctaattagtttccttccaagttaaatccttcccttctcttccttagtcctgtggctttttcccttcaattctgtcagcactttcccgtgggaactgtactggaagcagaggtgacacaggcccgggggctggggacagaccccacctggaaggaacaagatcagaggtagcaggatttggggtgggggaaaacgaaggaagttctttctaactcagaaattctttacctaatacagggtgtctttgtgggaataataaaacgcggcctcttcctctggaagggaccatcccttggccagattgcaaggacaggcttcagtccctctccatccaccctcacctgggcctccttgttcagtaggcaacctgctcaatgatatatatggaaagagcatcctttaagaatctgaggaaggctatggatcttctgtcccctaaaatgggtgcacatacacacacacgctatttcataagtaatatcaggaggtttctacactacttcagaaccctactctagaaaggactcgagaaatatctgagcccaggtccatctgtacccatcgataatgactttttaccagtcaccaaatatctataatgcatgccagactggactgggtgctttagacaatcagctactcgtcacaacaagcctgcctcatagatggcatttatccccgctttaaaacaaggcatctgagacgcagagagtttaataacttgcccagtgtggcacggttaatggtaaaaacaaactgcttaaaaatatcagctggcgagatgcagtgactcatgcctgtaatcccagtgttttgggaggccgaggcaggaggattgcttgaggccaggagttcaagggcagcctgggcaatggagcaagaccccatctctacacaaaattaattaattaattaattaaaataatagctttgttctagagacttctatccagttaccttaaagttgggccacatctctccccagctacacctactcagctccatttcctcactgagaccacctgacaccccagctccttcccaaggaggatgacaactcaagcctgatcctcctgtctcccagtccccaagtgagcatatgatgtgcaaaaatatcaccgcccgcgtccaggccgtcacgttccctagctgtaggctgacttccttgtctctttatttaaaaaaacaacgcaacccccaaaattttccccttaatggtggctactgattcctcctttaaaaaaaaaaaaaagcaggcaagcaaagtcacccagagattacagagatcaaaaacaaatccccccacagcagtgtttttcaaagtatggtcaccgtgggccaccccagcagtcacctgggatgtgagttcaagtgcacactctggggcctgactcaatctccagagcagcctgggaggctgcatttgtcacagtgatcctgggtgagtcctgtgctctaaagccactccgttgcagcattagaggcagcaactgagaaaaaacatcacttctgaaatgaaaactgagatcatagaatttttataagcatgatttgtaaaaagacagtgttgggctgcacagtgacttattaaagaaaaagattctgttccattgccccaaacccttcaaataaactatttaacagacggtggaggttgtctctgcagcctccaggcagtacagaccctgctactccgctccctaccgctcccaccatgcttcaagctcaagttcaacccggatgccacctccacctccgggactctctccccctccggaggtttctgagaacacctgactcttaccttatcctaaagccgtgagcaaacgctactcgctggtgttaatgggtggtcgtcagacactcgctttagcagccagatcagacggttttaaggtctcccactctgcatcctctcacaccccaaacccagaagcaataggagctctaaagaaaagcatatccacagggccccacacccccactccccccacacccagatctatatataacagctctgaagttgtcagcctaacgagccactttctggcagacccgttgctatggcaatgcttgctaatgagcccagtgccgtgattggcactgcttgaaggctcctccacaaaggactctccagcaagttctctcttccccaaccacggaggcagctggacacccagaagcagccagggcatggctgggcacgcctgggaaggttgagtcccggagtagtcctggactcagcagccaggagtggccccactgccagctctgcactcctcagggagtcaaccaattactaatggggctgccagagcccaccaggaagatcaagacccagcagggctggagactggcaattcactcccacgtcatgccttcctggtggacacctgtttaggtgggcagactcctacacagagctgggaacagctacccgagaaggatactctcctccagctctgggttaagacacaaatcatgcaacagtgacatcaccagccccagagtctgtctctaagaatactgggcgcatttcctgtctcacaggtgaaagtattgcgctccccaactccagcagcctttctagccatactcagaaatttcagtgcacagaaaatagtaggggacccctggcaacgtcacaacacatcctgaggactgcagtcttcacccagtagttatgcaggagacaggctggaccccggcagagtcttcattttcttctaaaggtcagagattcagagacttggcctggaaggaggaggttgggagagctgccatatcaacaaagaaacagactataagattcgggaagacagggccatgtccctatccctcttttcacagctttaatctcagcacagtgcccagaacaatgaatgaatgaatgaatgaatgaatgaatgaatgagtgaatgaaaactgagaattatagtaggaactaggcttcagaaatatttgaggaggctattttaccaaataagcagacagggaatgggagtgggagttagagaaagtgtgtgtgccccatctgtgaacaaatcccagctcttaatggatctattgaatggactctgctatggtttgaatgtgtcccctccaaaactcaggcgttggcaacatggtaggattaagaggtgggacctttaagaggtgatcagcccatgagggcgcctccttcagtgggattgaggctcttatcaaagcagcttcacgcggtattcactagcttgtccttctgccttccaccatgtgaggacacgctattcctttatctggcagacacagcaacatggtgccatcttggaggcagacaacagtcctcaccagacaacagaacctgccgacaccttgatcttggaacttcccagtctccagaactgtgaggaagtcctgttcttgagctaggcatcgtggcttgtgcctataatcccagctactcaggaggtttgcttgaggccaggagttcaaggagagcctggacaacatagtgagaccccaccgcccctccatctctccaaaaataaaggttttttgtttgtttgttttgttttttgacggagtctcactctgtcgccaggctggagtgcagtggcacgatctcggctcactacaacctccgcctctcaggtttaaacaattctcttgcctcagcctcccaagtagctgggattacaggcatgcaccaccacacccagctaatttttgtattttgttttgttttgttctgctttttagtagagacggggtttcaccgcgttggccaggatggtctcgatctcttgacctcatgatccacccaccttggcctcctaaagtgctgggattacaggcgtgagccactgcgcccggccttaacatttcttttttttaaatttagctgtgcatggtggtacgcatctgtagctccaggtacttgagaggctgaggggggaggactgcttgggcccaggagttagagactgcagtaagctatgattgtgccactgcactccagccgacagagtgagatactgtctcaaataaataaatacattcctgttcctcatacattatctggtctcaggtattttgtaagagctgcacaaatggggaagggggaggcaagataatatgtattgtttattttattgcagaaaatagatagaggaagaacatccagaagcctagaagcctcaagagaaacacaaacttctcatcaggatctcacatagtatccagaagaaacatctcagaaaagtatctagcaacctcaacaaagggcaggaagatatgacattatgatacaagaacaaaaactcataagaagagaacaaaacaaggcaagttggtttgaaaaaaaaaaaccaaaatgatataaaaaaggaacaggaaatgataaaaattatagggaagtttgaaaggttgtaacagaaggaaaatgcacattggttgcaataaaacatggaatcaatactgcaaaacaaagtgaattcgttatgtacagaacaaacgagaattgttttttccccagaatgcaaaggaaatgggaaaaatgcaaacgtgaggacagaacagcaaaccaagacatggatactgggtgttcctgaagaggagaccagcagaaaagctctaacagaaaagaaagaataaacaaaggttgatggggaggaaagttccagagctgggccacacgggacgtcctacgctgttcaaggcaaagtggatttcaaaaaaccaaccagcagacataccctaacaacatatttacacagcaaagataaggataaaagtcctgtaatcatttacgtgggaagaccagtgcaagaataaaaagaaggctggtctcaaacttctctgtagccacatctcaaaagacatctccggtgcatgatggggaaaataccacgaccttcattgtacttcaaggtagccaagctgtctttcacaagggaaggcaacagaaacatattcttctagagacaagtactcatgtcctccttagcagaagtacttaagagatgtacttcaactgcctgaaagagcaagacaaataaaggtgaagaatgacgaaatcacggcacaaaaggatccaggctgaacgctgaaagcagcttacagaaatgcatacgtaattatgcatttctagttatacaatcatgtatacatgttgctattctcaatatatactgtaaaaaaatgaaattataacctgagtctcaaatatagacagtactagaaaagggctgggtgcggtgcctcatgcctataatcctaatattttgggagtccaaggtagggggatcacttgagcccaggagtttaagaccaacctgcgcaacacagcaactccatcaccacaaaaaatttaaaaattagccagacgtggtggtgcacacctttagtcccagctactagggaggctgagacaggagaattgcttgaacctagaaggcggagattgcagtgagctgagatcatgccactgcactccagcctgggtgacagagcgagactccgtctcaaaaaaaaaacaataataataataattataattatatatactagaagagatcaagaggcaggaggaacactgagatcatgagaacaccgagggagatggaaacaaaacgctgaccttcctcccgtccccatagtgaagcatccgtgtcctgttgtccctcctgccaaatatcaggtatcaggtacctgaccagttggcatccatcctctgtccttgcttctcatgtccactcttgtcttttcctagaaactgacaggttctcaacctgaaggaacacaacagagggaaggggccttggagacccaaatccctggtgctgtgagtcttttgagtcttacctctaccgggttgtattggccccgagggggcagtcagcttccagggggaatcctgagccctggaatccattcaggtggataggttgggaccaaagtactttgtggatgaaggaaaaatcagtaggaacccagggctttccaaagacctcatctgaaacacctgtttggctttgtaagccttcaaagggttctcagggccaaaatacagagaagagcatgcggctaatttcgggcctgggcctgagcatgaccatgtcctgtggaactgtggttggacccgtgtgaaaagggggtcaggtgcatgaggcacacctgcagttctcaccagcaagaagccacaagagccaggagggtcgccttcctttctcccagttttctatttgcaaaatttgtcggaggtattaccagagtcctctgtgtgtcacctcaaacccttcttattagaaatcacctagtgagcagggctgcctccttgagtccctaaaagaaacttctcaaatgaggctttagtagatgcaaatgtcctccggcctcttccaaacctggcactatccaagtgtcctcaggcctcactacttggtgtagatagatgaatggggtgacaatgtatgtggcagcaatcatcagcacctcgctggcttgaatatcccacttgctcacatcagacgcccacccccaccagcctccttggacgaatccaaaagtgactcgcttgggctccccaaccaggttgcaactccagtcgccatggagtgtccggcatactcttcttcatctgcattagctacttcctccccaacaccatcactgtcctctgtccacgaagtggcaagaggaagcctcacactgtggctgtcactggcacccatcataagaggtagacattagggccatgggagttttctcccagccatgggcctgaaggctgaaccacttgggacactccagacctatccagctcctggtaggcttggcaagggtcacagccaccctgcaaacccccagcacatccctgagggccagtcaattcattgggtatgtttgtcaagactgggcagggagaggacacagaacaatagactctgtattttctgaccctgtaaagaaatggagtgatctggttaaccaggaattttgatgaacataattacaacgcagtccctgcagcaaggatacaggaagttcacccatcaaccctcacagggaaacttgccaagctggaaatatggagtctccggggggacaaggattgatgaaaagatttgcaaatgatcctgcaaactgcaaggatgagttggacggcccctcctgggtcagaagtcatgtcacagccttgcagcatctgagaatcaagctgtcggcagagggtaggaaagaaatgccttccacgtgggccttgcagaacccctattcctgcatgacccttcctcctctgactctggagaatgagatttttatggtcgttgcacctgctgtacgaatgtaagacagaagggccagttaatagggttccagaggagacaatgcaagaaatgaggaaaactctgaatgtgagcatgtttcttgcatctgagatggcccgtccttttcgttggtggcatctccccagcggcgccatacggcatgatggggatctgagagacgcccactcttcagcatgttttggaagaatctcggcattgacgaaccagcataattgtgccaccaaatatcagagtcactcttttggcctctgatagacgggtttggagcaggtgcctaaaggccttatgactgtgttttagaaccacaggatctggggtggaggacctggagtgtcatcccacaagcacccctgaaatacagagaacagctccagaaataacaagggaagcagggactgcttccccgccttgaagcctggaggggttggggaacctcagaaaaaaaaaaaaaaaaaaaccctacattttgttccatttcaaggtctctctggtcctgatgtttcagcacaattaaaaatgtaattattaaatgacaaggtagactcctcccaatagccggttccagcttctggattccaagccagaaaacctgaatgactgtgctcgctggcttttgattaacagagacattttattcaaactctccatttcctgatgaactgttgaggaatgttgcttctttcctcctcccccttccctagcagaataaaaatagtgtgggccattctgatatcctagccccaactcaggatgacaaaagcattaggagacagcacaaaggcctaggcataaagaggtgctgtgttcccagacagcaagctgtgatgtgtgcaattatcttagcctctctgggcctctgtttcctcatctgtgaaatggggggattgctagccttgaggtcctataacccatgcatgggacggcttttgtaacacagcctaaaaccacaaggaaaatatcaaggcagttaaatgtccagctcagcttccaaaaacagcagccacataaacaaaagagacgacagaggcctgacaagacacaaatcttgatgaaatattgctttgctcgctgcaagcttccctccaaacacttttgggctctaaagagaaagaggtctcaaactcttttggtctagataccctttcatttactcaaccaaatctgacttagaatcggtgggaaagaaaggcttgtctgagacaccaacaaagcgaagtgatataccaaaaattggaaatgaaatgcatgcccaaatcacggtatgcgatagtgcacatgacctcaggtctgtatggggaggctgaacagttggggattctcttcccctttgccacaggtccctgttacggccaattaatgctgaaacgtccctatttgtcaaaggaaggagttgagctagtacttttctcttcgtcctaaagattaatgatcttgacatgcatcctaggttttctatgctagttgatatctataacgatatcacttgtcctgacctagaaaacacttttgaaggacattttgtagattgttgacctaacagactccctagggagttcctggaagggtgagggcccctctaaaggattgctggtcaacttccctttgcagcagaaaaagcctgggaacaagagagttttgccaaacttggtatggcccagagagagagagagacagagagactatcctccctagccttcctttagtattaagctgcaaagcccccaaatgccttatgtcattgttttgggcactttctagacttctgaggaaaaccccagaaccaaatttaccaagcgtcctattgcattcaaaatggatttaagttcagaagcaagggagggagtccaaagttgctagctggatcagtaacaggctcagtatctcatgcaaagcagcccgctcaccagaaaggatcttcaagcacaagcgacacagctgctgcccgcagatgcaccggggggcaaaagctggcttcctcggggaattagtgctgttgtaaagaaggcagactgaagctcattatggtataagagtaggtgcctctgacggcccgcctgcacctgcgatccagctggcctggctttgtggccaccagttgctggctggagtggcctgcaggcactgaaggaaaatggaagcagctcatttccccaacacggagactcattccactgactgcagtgcctacggcctgtgctccaagtgattctaatcaaagacttctgactccgagagatggttcctgatgaggtctgaaccctgagctctggagggaaatgaagtctaataagggctggaaccgtttccaagactcagtaaggggtgcaattctcaccaacccgattcaactaacatttctggagctgctgccgctggcacatataaagtaggcaaatggtgacagccaagggccttgctatggagatgtgagacctaccactgctctgtgccaccgtgcgaagaacacaggatgggaatcggagctggtaaagctgcagcagtctcgctggcagatcttgagcaacctcttccatctctgctgggaggcctcaattgcttcatctctaaaacacggaagttggaccagatggtctccaagggctttcatatatacatatatatagcctaatacttaataattcttttttttttttttagacagtcttgctgtgtcacccaggctggagtgcagtggcgtgatctcggctcactgcaacctaagccttccaggttcaagcgattctcctccctcagcctcccaattagctgggattacaggcacctatcaccacgcctggctaatttttgtatttttagtagacacggggtttcaccacgttgaccaggctggccttgaactcctgacctcaggtgatctgcccacctcggcctcccaaagtgctgggattacaggcgtgagccactgcgcccggcccaataattctaaatgtcagcattagtatatatgttttaaggacatgccattttaataggagaaaaaaagtcacattcaagtgtagacatgggcatcatgtctaggaggcatctgactgttcctgaaacgtgggctgtgccccaaacaccaaggatcctgccttactgcacccaggattctgtgcttccacctctcaccacactgagttctgtcctgatgcgtccacctcttccctgtcactcctccgagccacgtgagtggtcttagctctatttgcctagcaactggatttctgccctggaatcctgggcttctgtctctgcatcaccctggatgcaccaaaggcgggttccagtggaatttttctgggcctgttagcagttagcacttctggctgactgctcacattacacccctaacacacagcccacttcagcttgggggcagcccaccaacagcctctgcaccccacacgccctcttcccaagagcttgacttcggctcttcccagctccttgcatgcccttcagtgttcttcttctctgctactccctccacccccatgaagcacccaaccacgatccacacacaggcctgccagaactccctgtgccctacagtcagacccaaggcagccacaccttggtcagaacttgagtgattggtctgggttcctcacagcagcaaatctccaagtgtggcccccgcacgggcagcatgaagttctctgggatctggctatcaatgcagagccccaggtcctgccccagcaccggatcttacattttaaaggttcccgggtagttcagatgcacgttaacctttgagaagcactgctgtggacggtcctaggtcaactaacccgttagagatgctcctggataacaagcaccatctcccttcccctggcactgtgggaacaggaagccatgccagaatcagagatgctgatgggcccagggaggtgggagagcatatcctggagggagaccatgtaccaaaacaggccagcctttccatgcaacctggacctctcacagctgtacagagcctcaagagagtgatcaccactctcttggaggtcctcctttgcaaagaaagaagatggatgcgtaacttctgggggtggaaagattggtgaaacaaggctgttgtactgctaagtatcagaagagcttccatcatcactgttgcagcctccaccaccaagctggaaagatgtctcagccaagcctggaagcacagtgcattactgggcaggtacttctgctagggagccatgaccccaggagctcccacttaccttcataaagttttatagtcctcaaatggcttttgccttacaatgccccagctagaactgggccgtggggtaaaagccagataggtgggtagaatccaagtttcttacttggaaaaagttacatggaggaagcaaggtttggactccattaaaatcacatcaccactctgcttctccatcacacagctccaactacgaaactgctccccaggtaactaggggagccaagacttcctttctctccaagacatccttcataaatctttctcctcctcccatccgcttttcctgatctctcacacaatgacccacgtcttttttttttttcctccctgctcatgccttggatctgtgaaaggtgccccctagcacacagggtccccagaccaccacagctcagcagttagaccccaaatctcagttttcagagctgcctctttaccatggcacagtcattttagaaacatgcagagaaaagcaaactggagcatacatctgcaggcaagaaaaatcaattcttaccatcagagaacagctaaccttctctgggggctgctacctcagaggagagtcttgggtcctgcctgaagccctcagactcagcaccaagactccgccggcttcctcttcatggcagcctctccgggaaatggggctgaggcaagtcgctagcccagggccagtgttctgggcaccccagcggaggttcctgtggctttgctcattgctgttctttcacaaagaacccactacattgcatagttccttccaaatccgctccagtgcttgctgggaaattaacaacttgttctggactttccagatgcaatgtttctggaggcctttctttttttcccactctccctctttttcccctttctcagctaaaaaacgttggctgaggtcacaacaaacaatggccaagcttgtgtcactgagcagatgcctcccacccccaggcctgtggacaagggcagctttgtccactgtgttttaggcgggacttcctgggcctgcccaagccctgctggagaatgttttggccaacttcctcccaaccctaagtcacagctctggtcctggccccggccccggccccagctgtgtgaacccaaggccagataaaaaccaacataaaaagaacggagaatgttcccccaaagaaccactgtgtggaaagctggtgcctccagaggggcgagatgaaggtctcttgccttcactctgccctcgccaccatcaaacctggacagataacgaacaaagacaggctcatgtgaggtctccactgaaaggggcctgaggatcacaaagtcattagttacaagtggagaaaggattggaccccaagagcaatactgcagccaccaactaaatgagcttgggcagggcttggatccttcatgaatatatcctatcactccgtttagaaaggtttttggagcagctgactatttagcactcaaaatgccgcatatttctgtgtttgctttcagatgcaaacctttggggttttaggaactgattctttatatagaattaaatatggttttctagagaaaccaagatcctgaggaccgagtggttccctattaagcaaatggataaacttatttatgaagaggtttcaatgccagctccttgggtcgggggaagaaaataagtacaatcgtctaaggatggagtcagaccagagctaagctgttgttttactacatactagctccaagaccctgggcaacggctccagcttcaatttctccaagtgtaaaatgcagatgatcacagtatctttctcaaaagattgctgtgagagattaaagggggtgggggtggggcatccatgtaaacatttcacctagtggacgaagtaaatgctcaatgaaagctaggatttttgttgttactatcaccagtggctgaaaggtaggcactgcagttaccccgggtccaaaaagagtccagactgaacaataaaaagcaaacagcccaatttaaaaaaatgagcaaaagatattcctccaaagaagatataaaaatgaccaataagcacatttaaagatgctcaatatcactaatcatgagggaaatgcaaatcaaaactacagtgagatattagctcacacccattaggacaggttcttaaaaaaaaaaaaccagacaaggccaggcacaatggctcatgcctgtaatcccagcactgtgggaggccaagacgggtggatcacttgaggccaggagttcaagaccaacccggccaacgtggtgataccccgtctctactaaaaatacaaaaattagccagtcgtggtggtgtatacctgtagtcccagctacttgggaggctgaggcaggagaatccaggaggcggagggtgcagtgagctaggatcacaccactctcactccagcctgggcaacggagcaaggctctgtctcaaaacaaacaaataaacaaatatcaacaaaacagaaaagaacaggtactagtaaggattgagaactgttggaacccttgtgcccttctggtgggaatgtaaaatagtacagcccctgtggaaaatagtgtgttaattcttcaaaaaaattaaacaaagaattgccatatggtccagcaattccattaataggtatataccaaaaagaactgaaagcagagtcctgaagggagggtcttgctgcctgttcatggcaacattattcacaagagccagaaggtggaaacaatgcaagtcgtagtaaaataaacacaatagaatattactcagccttaagaaggaaggaattttttttttttttttttttttgagacgaagtcttgctctgtcacccaagctggagtgcagtggcgcaatctcggctcactgcaagctccgcctcctgggttcaagcgattctcctgcttcagcctcccaagtagctgggactacaggtgcgcaccaccatgcctggctaattggaaggaaattttgacatatgcaaccatgtggatggaccttaaggacattatgctcagtgcaacagccagacacaaagggacaaataccatttgcttcacttctatgaggcacctagagaagtcaaattaatagcgacaggttgcagaatggaggtgaccaggtgctgtgggcagggaatgatgggaagtttgtgtttaatgggtccagagtgtcactggtgcaagatggaagcattctggagattaatggtggtgatgatggctgcacaaacacgtgggtatactcaaagccactgaactatacatttaaaactgatggagatggtggatttcatgtcatgcatattttgccatgattaaaaaaaaaaagcccccaagacccacagagatagtttagatcaaaagaccctgtgacccataagccgcttcatgagatacaccacctcaggctctccatgtacacccagagggaagctgccccagcctcttggcaatggtgaagagaaagcccacctagaagatgagggtgggaccagggacggtggctcacgtctgtaatcccaacactttggaaggctgaggtaggtggatcatttgaggtcaggagttcgagaccagcctggccaacatggcgaaaacccatctctactaaaaatacaaaaaattggctaggcatggtggcgggcgcctgtaatcccagctactcaggaggctgaggcaggagaattacttgaacccgggaggcagaggttgtagtgagccaagatcatgccactgcactccaacctggacgtcagagtgagaccctgtctcaaaaataaataaataaataaagacgacgaggctggccacctatagcaggactcactcaccatggctcgtcttgcgttcaatcttggggagaccgaggtgacacagccagcatcctaatgtcaatcgagggattttccgtttaggggtgtggcaccctctggggctcccagagggggtgacaatgtgcctttcccttggacatatcaattccttctgtgtccgcatcccaccttcctggtcttttctcttacatgcctgacagcagggcccatctcttccttcctaaagttactgacgtggctgctggggggactcttcctccctctctaattgctgggtttcaatctgctgcaggagtggctgtgaggatcttgtactgagcactcactttggaccaggcgctgttctatgcttcacatgtttcatgtcacttaatccctctaacaaaccaaaaaggaaaattctatgatcgccctcatttaacagaggaaaacagaggctcctgcgagagattgggcaggatgggtcagaagaacaagccacaggggcaatattctaggccatggggccagcctgagccaaggtgagagagaaaccgtgtgggtagaggctgtgggggaaaagcaggtggatccattcattagagtttaagaggcatgggaggtgagaaatatagtagtgaaggatggcatcagatcatgggaggccatgaggacaccaagaactaagaaatttcgattctataaaggagaagaaaccatcagtggattctgagccagggagaagtcacaatcagggctgtgctttgtagaaatcatcatgataccagggtataaaaaggtcaaatgtgagggagaaactagagggaggaaaccggctatagaatcccccccaccttctttctctctcccccctctcacccatcataaaaacaagagaaaggcaatgctcaagcctacacttgcaaaatggtcccaaaccagccatgaagaggaggcaagagcatcacatccagcggtggggagtcccccaccggcagctgagttatttgcatcttctctctgcagtgtgggaggagaggccgggtgacgaatccacacactcgcttttgaggtcagacatgctacagaaatagacaggaccaagatacttttctgttcttggagatgggctctcacccataagaaggtaaaagcgggccgggcacggtggctcacacctgtaatcccaacactttgggaggccgaggcaggtggatgacctgaggtcaggagtttgagactagcatggccaacatggcaaaaccccacctctactaaaaatacaaaaattagccaggcgtggtggtgtgcgcctgtaatcccagctaccagggaggctgagacaggagaattgcttgaactcaggaggcagaggttgcagtgagccaagatcgtgcagctgcactccggcctgagtgacagagcaagactgcctaaaaaaaaaaaaaaaaaagaagaaggtaaaagcaaaacttcatttgaacctagatggccaagaccttcaccttcagtccttacaggtttgtgaaattaaaatggccatgaaagctttcatagcctgtgactcctcagttttgtaacagcaaagaggggacagttttgatgctgttaaacattaacagccgtctccgacaccactttgacattgcatcacacagacgaacagatacaatcacagacaacaatgcatcactccaggcaacacacagaaatcactgtcattgcaaatcccagtagggcccccagccaagggcaagggacctttccgggccattacaaaccaggaggctgatctgctgtggcctgacctcagcagaacacactagtcctgcagacatttaattctttaggattccccaaagttaatctctcagagtatggaagactcacgaatacattctaagggtttactgtttgggttcatcctagcatctcaatccagaagtcactttggttttcctttattaaccatccttagtgattagcgttggccgtgaaaaacacgctactggtctctccttgtggcctctgcaaatagataggttgctacatatgaagccacacacacgaacggcagacagcagagaatccgtgatcccaaagcaaaaagactgatgatatttccaccaacctgagttttcctgagttcaacggcatcagataagaccaaccctcttattatttttttcgtttcagtcaagttgaaaactgtcaaccaaaataggccttatttgctgtaggcccttgtcctctgtaggatgaattgggttgtcttaaaatgataattaataggccgagcacggtggctcatgcctgtaatcctagcacgttgggaagccaagacgggcagatcatgaggtcacgagttcaaaaccagcctggccaatattgtgaaatcctgtctctattaaaaatacgaaaattagctgggcgtggtggcacgtgcctgtagtcccagctacttgggaagctgaggcagtagaatcacttgaacctgggaggcagaggttgcagtgagctgagatagtgccaccgcactccggcctgggtgacagagcgagactccgtcaaaaaaaaaaaaaaaaaaaaaaagataattaataagaaaacacatctgggtagggtgatgactcacttttgtaactgcttcacagtcatgaacggaaaaattattcatcagcccaagcagtctctagggtacagggtctcagggacgcccccttcctccatacgtggccccctgtctgcatgatcaatcaaccaactaatagttactaactaccctttcctgaatcctgtgtgggatgcaggcaggtattgtatgtaggacctgactcctaaaattcggaagctaagtcgcaaacatgggcaaaaaaaaggaataagtatcaaaggagtcttcaacagtgccaaatgctatgtgataagctggcagacaataagagctttcagaatccagaggagggcgaggtcactcttggctgggatggtacagggaggcttcccaaaagataaagaacttgcctcacagcagggataaaaaacaagggcttgactggagcccgaggaacatgatgtacgaagcagaataaggtttgataaaggacgggacataaggaaatgagagacagcgaagttgattcggaaggaaatgacagaagttcgaaccagtaactcgaagagatgtggctatggtgacagccagtttagggggatgcagtagagtctgttgaccatggatccaagttcaaagtgttcggtggggagtaggggtgagtctggcccttggcacatggagctggagctggaggcatctgctcagagatggtggtgagatcctacaggctgacaaggagttcacagagaaagaaaggaccttgagctgaaccttggggcatgctcttgcttaagcagtgggagaagaattattctcccccagcatgcctcaggcccaatccctccctctcctgtgcctttcattagtgcatgcaacacccccagggcccctctccaagactttcaaaggcaagaaccaggtcttcatctttttcacctctaaccagactagtgctcaacactcaggggctacatggggaatgaacgatgtgagttctgagaatcaggcagagaaaccaaatgaagaggggggatacaagaagaaataagtacagctgacccttgaacaacacgagggtttagaggtgctaacccccatctccccatgtggttgaaaatctgtacctaacttttgactccctcaaaagttaactactaacaacctactgctgactagaagccttagcgataacctaaacagttgataaacatgtattctgtatgttatccatattacagactttattcctaaagtaagctagagaaaaataaaatgttaagaaaatcataaggggccgggcacagtagctcacacctataatcccaacaccttgggaggctgaagtgggaggatggcttgagcccaggagttcgagaccagcctgggcagtctggtgagtgagagcccatctctacaaaaataagtgaagataaaaaataaaaataaattaacctggcatggtgcatgcctgtagacccagctactaggcagactgaggcaagagtattcttgaaccctggaagttgaggctgtagtgagccaagattgctccactgcactccagcctgggcaacagagtgagaccctgtctctaaataaataaataaaatcataagaaagagaaaatacacctacagtactgtactgtatttactgatgccataagtttacatcatctgtttaaaagatgaaacctttgaaatggtggcagcagcagctgcagacgtcagtctacggtacctgacaagcaattgaactttttcttgtaatgtcaggacttttctctgcttctggggaatgctttcagcatcactagtggcacactctatgggtcccatggtgttattcgaggcttatggcattgcactaaacatgatgaaaaatacatagaacagtgagggcttacattttactgcgatacccaatttactggagtgatgaactgttcatccagggctgatcagcatcacatgacaagccgatgctctcaacacctgagctcactgcaataacaactaggggtggccatgaagttactacagtatatactatggctagttttatgcagttatgattaatactacatctttgcctttgtttacattttgcttaaatatgaatggtgccatacacagtctgagtgtttgtgtgggtaaaattttaaaaattttaactttctgtagatttgtatgtattttgtggtagtaaatgataaactagtatcgaatatattttatgtattcacggcatgtctaacattttctaaatttttttggtatttctagactaggtagtctgtcttcaatttttttcaaattatcacaaatctccaaaaatattttccaatatattaattgaaaagaatccacatataagtagatctgtgcagttcaaatccattgtctgagggtcaactgtagttaagagtgtccggccaggcgcggtggctcacgcctgtaatcccagcactttgggaggccgaggcgggcggatcatgaggtcaggagatggagaccatcctggctaacatggtgaaactccatctctactgaaaatacaaaaaattagctgggcatggtggtgggcacctgtaatcccagctactagggaggctgaggcaggagaatcacttcatcttggcagtgagcagagatcgtgccactgcactccagcccgggcgacagagcgagactccatctcaaaaaaaaaaaaaaaaaaaagtgtccaagtgagatgccaaagaaaatgctcgctgaatacagaaagggtgtgtctcatttatcttggaaagagaaatatggaagagtgatgggtgtagacttggatcacaggcacacaaggacctatgagcataggatgcaaagggaagcaagatctttagataagatgccattaaagaagagaacaagaaagaggacaggccatagactgtggctggctccagaccaagggctgtgctgggcagagggctcccgtgaggtgactgcagccagtttcttgtacatatcatggtagagtcctaggacccttataaaatttctatgtgtcccaccccataaaagattcctagtattggccgggtgtggtggctcacgcctgtaatcccagcattttgggaggccgaggcaggtggatcacctgaagtcaggagttcaaggccagcctggccaacatggtgaaaccccgtctctactaaaaatataaaaattagctgagtgtggtggtggtcgcctgtaatcccagctactcagcaggctgagacaggagaattgcttgaacccaggagacagagattgcagtgagctgagatcgcgccattgcactccagcctaggcgacagagtgagacgctatctcaaaaaaaattcccaagtatcaagtggacatatcagaaacggcacccagttgaaaaggcctccaaacagccctgattctaagagatcccacagcttggtttccccttcctgcagtcattcatatcccactgtgacaccttgttccatccatcactgtgtaccagccgcactattatttactcaatatttttttcgaactgacttatatcccactgaaatgtagtctggccctaagcaataatatctatgaaatcacagatttgatttggtttctttctactacacactaaaataaatataactttaaaactgtcatctccacatgatctaaaattatctcacggatccttagttggaaactcagcacactttgagaaacactgtctctggctacacatcaagtcaccatgcagcatccacaaagtggttctggagattcttttttttaatccagaaaactgaacttgaattctctactgactacgtccccacaacgacaggaacacggtacccggcgtgtgactgaatctctgggagattaagggcatggcaaaaggagatgcaggggacttccctgtaagaagcatctgacagctgccccaggacactgcctatcaaaccagcaataagaggaaaagaacaggaaataactcatccaatcttaaaaacaaaatccaaaaatgacaaacagaatcggaggaaaaaaaaaaaaactcgagaaccatgaggccaatgaaggaaatgcagaaaatcttgcaaaccgctgggcgcggtggctcacacctgtcatcccagcacactgcccgcctcggcgggcagatcatgaggtcaggagttccagaccagcctggccaatatagtgaaacctcgtctctactaaaaatacaaaaattagccaggcttgatggcgggcacctgtagtcccagctactcaggagtctgaggcaggagaattgcttgaacctgggagtcggaggttgcagtgagccgagatcacgccactgcactccagcctgggtgacagagcaagactctgtctcaaaaaaaaaaaaagaaaagaaaagaaagaaagaagagaaagaaagaaagaaaggaaggaaggaaggaaggaaggaaggaaggaaggaaggaaggaaggaaggaaggaaggaaagaaaagaaaagaaaaaagaaaagaaaaggaaaagaaaagaaaagaaaagaaaatcttgcaaaccaagatgagttgtaaaaggggaaataagacttcacaccttcaccactctctgcccataatctgagctgcacttcatgcctctgccactccatgtctctaatttgagatgcaggatttgcactgacctgaacactgagcagccagccctctcctctcagcacagatgctgtctgagaggactgcccatcatccatttaggtacagcaagtcccagaaaacaagagagcaggaagtgcagggtagaacaaggggcgtgggaggggtgctcactgttcggaaaggtacagatgctacaggccaagcccagccaatgccctggctgcagggcattgagaagagaccccaggaactgtgagttttcatgttctccatcaattcggagtatcagaggaccagatagtaacgtgacagttcaccaggcaaaggccaattcgaaaacagaaactggactgagagatgggtgcaccatcgaaccctacaggcaggtagctgtgaggggaagtcaaccttcccccaagccgacagtgtgccaaggctagtgacagtcgatactttctgttggtacatgccacgtttacatagatcctgccgtgtcaagaatgcataaagaggggaaatatgcaaaagcagggtgaggaaacaccatcctgaaagcacaaaggaagagcacgtctcagaaaatcattcagaagaaaaactgtcaggaaactgtcagaatgtaagaagctgtgatttctttgaaagaggaacagcaaatcataacaggaaaaaaaaagcagttcgaataaaaaggatgacaaagaagatagtggacgaggtgaggattatataaaaattgctcatttaaatccatatttagttgtagttgtgggtaactgcaaatataaacatttaaatcagtgacttgcggggctaacaggaaaagtgtccccaaattgcaaaggacaaaaagcaaggaaatcaagagtctatgtaacatatatgtttaaaaatattccattattaaagaccagaataggttaaacttaataaccaattgcaattaaaattatcaagtattaataaaattaataatgaattgcaaaaataatctaaaattacgcatataggccaggcgcggtgactcatgcctggaatcccagcactttgggagggtgaagcgggcagatcacttgaggtcaggagttcaaggctagcctggtgaacatggtgaaaccctgtctctactaaaaatacaaaaattagccaggcatggtggtgcgcacctgtaatcccagctacttgggaggctgaggcaggagaactgcttgaaccaaggaggcggaggttgcagagagcggtgatcgcgccattgcaacctcgcgccattgcagttgcgcctgggcgacaaagctaaactccatctcaaaacaacaacaacaaaaaatcattcatataaacaggcaaaaagagaaagggttacccaggaaatcagattttcctcagacttctcctctaccctccctaccaatggctagagagctctttctactagaataaaagctccatacagcagggattttgttttgctcactgctctatcacggtgcatacagggcctggcatcaccccttggaaagtgctagaagacaaaccccactgagtttaaagcttcacggggtacagtcattgttatgtccattgctgtgggtattcaataaatatttgctgaagctaaactgcaaatgtgaatttttacccaaaactttgtaattcaagacatacaaatccatcaagttgtatgagtatttcaagtgaaagaaataggaaggttctgttagaggcatgcaagtgaagacaccatctccttaccctccaggcactgagagagaaaattaggaagacaacacagccatggggaagtaataatacaaatacaatgcatatgtaagtcatttcttgctcagtacaaactcccaatgcaaaaatccagagaactgtgtgctgcctggtggattttccagctcattgcgggggggaagattagtgccttagtatttcattcacctccttttctgctcctgtccatcccagaaccaggatacgagtttctcctacaaggccagtgcagatgaagcaatgggccatgtgtgaggagcacgcataactgatgttccctttctgtccaggcgcataccaacaatgaggactattcaagctttagggacactctgctgggaggatccagaaacaagaagtctttgtttttcgtgtccaccaaagcaacactgtgctatgtaaggcaccacagtggccattttcttcgccgtggaacttcagtctttattttctgcatgttaaaaactcatattgaatggaccaagtcttgttttcttccttaatttgggtaagaccaataaaccaccccatggcaatgctttctgtcatcaaagccctctttatatcatcctccctctaaaagctgtccctgctttagaaatcaaagtatgcagtatgatctcaatatggaaaatagcactccctcacccaaatgaagtactaaagaaagacacagacacattaacaaagcttatctttgtattgggggattctccggttgtttcaattctatttctttcaccaattttaaaattttactttatttaaaaatattttaaaataattttttgatttttaaaacgtgttttgaaattacttctttttttttttttttttttttttttttttgagacagagtctcactctgtcgcccaggctggagtgcagtggcgcgatcttggctcactgcaagctccgcctcctgggttcacgccattctccagcctcagcctcccgagtagctgggactacaggtgcctgccaccacgcccagctaattttttgtattcttagtagagacagggtttcaccatgttggccaggctggtctggaactcccaaccttgtgatccacccaccttggcgtcccaaagtgttgggattacaggcgtgagccaccgcgcccggtctgaaattagttttacaatcagcaaatcatcatatacaatcctaaatatactatatgatcccaattgtggagaaaaatatacacaacataaaaaagaatgcccctaattattttcttatttctgtttttctatattttccatgttttctataatgagcatattaattttaatgccttttaaaaattctaagcttattttctattatcagctagtacatgaatatcaccttactaaaattatttaaacaagtccaataaaaccctccttgacatatcccatcacatttgacatcccctaaaatgagtactatttatcaggtagggtttattgtattatctttcaaatggcaagacagttggtggggtgggggggctttatctttaagaaaacagagacaaaatgactttctcaaccaatgcaacgctaacacaaaaattagagacagaaggcaccttagtaatcatctgatcacatctcatcattttacagatggacaaactgaggcctggagacagagcttggacaccgagtctccccagtacccacacagagccctctccttgccctctgcccaccctaaacctgggtgcagatgtcacccccatgactagagggctagcacatggtcagatggcacagcagaaccaaggccccattcaggaccactccccaagatgacctccacactgctggaaaaggtgaccctctccatcaggcccagctctcttctcctgaagcacaagctacttcccgtctgttagcagccaggcaaaccccacgaaaggaagggcccagggaggaaacatctgtgtatacacgaggggtgaagtcataagccctcttgactttcccttttggcaaatcctcttctgcctaattttttttcccctacatcattgagatgcaaagctccattcaaacaagggggcctggaagactccagcagcttctagaaaccaaaacttccattctgctacagagattctcaaaagaaggtatgtcttgttgcactggggtgtgggtggggctaagaacagaagatagatgccctgcaaaccactcagttgaccacagacatccatgtgcttacccctaaacccagcttctgcccttcagccaagcagagaggaagctcaaatgcaggttccacagcttctcagccatataaccctggccaaggcacttcacctctacaaacctcatcttttttctttcccacataggaaaatgcagatgccaccacctacttcatagaatttttgcagggattaaataagacagtagaaacaatggtaggtacatattagcttcatcccatacttttccatccccttgagaaaagccatcaactgaggtcaccaacgctgagtcactcatgttgcccggactttcccaacagcacggctaaactctccagaatgataccttctaaccattctgacataaactgagctgactgaaggaaagagcacgtgaatgacgagactagaattcaaagaaacatcagaataggttctcatcaatggctttgcgggcctagagccctccaagtaaatacatttggaaaagacgtggtttcttggctcgcatggactgtcccctaaagtaactaaagccattagacaaagagaaagctgaaggagaccctgccagtaaaactcacagggcggagaacacacgcaagtccacgagggctacaaccatacaaagctgctggggtaaatgaaaacaagacccagaaacaaacatggtccttgaccaagaactgcaaacaaaccagtgcaagaccctggcaaacttctgaaaatggcctcatgtgccttcatttgaacatgggcaagggcactccaagaaaatttcgtaccccagatcgatcgctcaagctcccaaaaatgagacaggctggataacaggcaggaaaaacgggttaagtttccctttttccccagcattggatatcccccaaatcacattcactgcctttatctcaccattagatcttatctttttgttgtttttagtagctaaaggactactgtggaccagtaacttgatatacagtagtttatttgacccttataaaaaccctgggagggaagtatttattttcattttataatcgggctagcttgaacccagtagtctgtctccaagactggtgctagttccatctcaccccacactgtcccccgattcctccatttacaatcatagaaagctgatgggctgaatgaaaacgagccccagaaacaaacctggtccctgaccgagaactgcaaaaggcagttcccaaaacactttcccatcatacctgagactcctctgcggcgtctaggaatccaatatccaaaggcaaatactccagggttgaagttacagtcgaagccatgacctgccaaggccttgatcatcaactgtcaaattgataatcaggtagaaggtaacaggagattgccagtgggaagcctcattaactagtgggaggggtcccagcggggagaaacaggtctaagagggtgggtaggaaactaccaagagaagcatctccacagcaaagagccgtgaccagcaccctcgagtgaaatgacaccctagaaggatgccaactgagtgccacacactgcgtagctgtgagcagttttgtttttcagctggcagagctgggagtcccagaaggcaccccctgcccacccatgcaaagcaagtaagcggcacaggctgccagaggctccgtcctcaccctcacgcactcacgctcagtcaccagaaagcccctctcgtgtaggctgaattctgggagcttgagttcaactctccagcccagaaggggaaccaccttgctctgtctagtgggccaggctcctcactttggggctttctcctgggcaatttagcccctgcccctgcccagcttctcctcccccgtgcacagccacacctcacccccacagcggctctcctttgggtggcctgagataagcggccttcatcccttactcatgggagctccttgagaacaacaatagtgtcatactcaaatccatccccaggcacagaaaatgtacacaataaacacacattggctacatggagttcttcctggtctctgagtagggttttcagctcacctagaaagtgggtttcttactttcctgtggtcacccaggcagcaaggtggaggaagagagggaaacaagaaggcagagatgaaagcactacccacacatttatctattttaccctaggaggagtctgggctacttaaatgctctcaggggtccccaaaccacaaatgaataaaatggaccaaggggaaaagatcaacaacggcttcgcgagcctggggccctccaagtaaatacatttggaaaagacgtggtttcttggctcacgtgcactgcccactaaagtaactaaagccattagagagaaagctgaaggaggccaagtgatcttctatgaaaacagcagtctgagttaccaatgctagatctgaaatgtacatgtgtggctggctctttacctacatgattttaaagaactggcatattttcacccaaggacccccagcgcctgaatgcctggtcaccctggagaagcccttgtttgtagggtcacacaccaccagccccatgggaagggagcccaggaaccatctctccagaacagttgaaggcaccaggtctcttcatcgatgtggcatctgtggagcccacagatgcaagtgctgaatcgtctagaaaaaacgggactgagatttgctgagatctcaaaatctggaagaactcctccagccctctccgcaggtaccgactctgcctggaggggcacggcagtgagatccttaactcctctttggctagggagcctcacctctctcccccatgggtcttaaaaggagaggagaaagtgacaataagaggtgctggcgtcctatccatcccctgagcatcagagcggtgattctcaagcttcagcatgcatcagaagggctgttaggacacagtctgccgggcccaccctccaagcttctggatccgtaggtttgggtaccatccaactatctgaatttctcacaagcccccaactgatgcagctgttgcacacgtaggcactccactttgagaatcactagtttcaagagaaaaacaaagacggtctgttctaaatcgacctctggacctagaagattaatctttaggaaacataaattcactttcagaaagaaagagactcttttaacttttttttttttgaaaagcatggccctcttactttccttcttttcatagacatgggtgcggggaatatttcctgctttccctaaccataagaaaaggaatccaaatgaaatgaataatggcaactgttccactattggccttagcgctggtaacagcagagatgggtggagactgcgcaaattggaaacccactacttatcatcagcatattgttgccaagcagggcggcaggcttggtgttgctagagcatctcgtttttgcaagagaagctggaaatctggatttttaatggaaaacctgcagattttaagatgttggcaaccaactgaaacatttttaagtgaaaccatgggcaaccaaaaacaaaacaaccactaaaaaccccccatgattctgtatttgattttgcacaccggctaccagtgtgcaacccctgattgtaactgtcgggggcctttataagcagtcgtttgaagagggggttccctggttctaacgaattgaataccacccaccttagactaaagtaccaatcagcacgtctgctccataccacacatccttttagccaggacctcttacactggtgggtgcagctggatgccagcttccacgggatctgtgaaccccttccaagggctgcaaatgtgtggcctgctcccacccacccgagaactgggctccctgagcctgggcctaaccttctttggaaaggaagcacaagacaagattcctgaggcagaagggaccctggaaagcctgtcctactcagtctctggaaagaggagcagcccatcagctgagaaggtttggaagtggaggaggtgcgtaagaaagctgaaacaggttaaggaatgaggcaaacaccaccaggagaaagcagtcaggggcgacaccacacatcaagcaggctgatagaagagcaggaatttgggaacggaggaggaagccagccaggcacagtggcctggggtaggatagtgcacatcctcaggtctgaatgtgaaatgacacagccatcatggtgagcagagagatgcccatgggtagcaagcccaagcgctggaagctagcacctgggaacatggggcatggtgggaaggaaggttggatccatgcctcgtgggagatgtaaggtacccaaacctgcagaggtagggagagtaggaacatgtgctctggggccgctgggaagaatgcacggtgatgtggccataggcatcctcactctgcccacagaagctgtcccctggcggacctcaggccctggccacctccctgttcccagacttcctgctttccagttggcttgttcatccctgtctgtaccgcactgcacatcagcttcccaaaatgacgttgcatcctgatccccaccccactgaaaacccgtcccctccctttccaggttggccaggttttcccccacaaggaaatcagcagccatctcccggagacagtccaggcccattcagccaccgctggaggccagcagttttcaaactttattttcaaagtctggttcacaataaaaaacacattttacttcacaactcaatatacaaaaacaaagcaaaagtttcatggaacaatgcttgcccttgccacacataacgcgctctgatatttttccgctctggtttttgtgcaggttgacactgattgcttgcattgtgtgactcatgatgtatggtttggaaaacaatgctttacctggtcccaatctccatttttagaatctctttttttaactccatctcaatcaacaacccctataaaggattccttcatgatactttctttgacccgccaggtagaagtgaattatccccaattctgaatctcccagcccctgcagactgtatatcattcacgggcacttagatgatagtcatataatttttctcttttctagaacagtgtccaatgtccgggtgcagtggttgatatctataatcccagcactttgagatcgcttgagttaaggagtttgagaccagtctgggcaacatagtgagacccccatctctacaaaaaatgtaaacattagccaggcatggtggtgtgtgcctgtagtcccagctacttgagaggctgaggtgggaagactgcttgagcccaggagttcgaaaccagcctgggcaacaaagtgacagcctgtctctacaaaaacttttaaaattagccaggcatgatggtgcacacctgtagtcccagctactcaggaggccgaggtgggaggatcgcttgagcccagaaattcaaggctgcaatgaactatgagcatgccactgcacttcaggctggggaacagagtgagactctgactctggaaaaaataagcaaataaaaaataaaaataaattaaaaaaaaaagaacaaggtctcagtcttcggctccaacacttaaaatatccgtcaaatgggccgggcgcagtggctcacgcctgtaatcccagcactttgggaggccaaggcaggtggatcacgaggtcaggagatcgagaccatcctggctaacacggtgaaaccccgtctctactaaaaatacaaaaattagctccctctccctctcccgtctccctccccacgatctccctccccacgatctccctctccctctctttccacggtctccctctccctctctttccacggtctccctctgatgccgagccgaagctagactgtactgccgccatctcgactcactgcaacctccctgcctgattctcctgcctcagcctgccaagtgcctgggattgcaggcgcgcgccaccacgcctgactggttttcatatttttttttttggtggagacggggtttcgctgtgttggccaggctggtctccagctcctaaccgcgagtgatctgccagcctcggcctcccgaggtgccgtgattgcagacggagtctcgttcactcagtgctcaatgttgcccaggctggagtgcagtggcgtgatctcggcttgctacaacctccacctcccagccgcctgccttggcctcccaaagtgcccagattgcagcctctgcctggccgccagcccgtctaggaagtgaggagcgtctctgcctggcagcccatcatctgggatgtgaggagcccctctgcccggctgcccagtctgggaagtgaggagcgcctcttcccagctgccatcccatctaggaagtgaggagcctctctgcccggccccccatcgtctgagatgtggggagcgcctctgccctgccgccccgtctggaatgtggggagcgcctctgccgggccgcgaccccgtctgggaggtgaggagcgtctctacccggccgccccatctgagaagtgaggagcccctccgcccggcagccgccccatctgggaagtgaggagcatctccacccggcagccgccccgtcagggagggaggtggggggcagcccccgcccggccagccgccccgtctgggagggaggtggggagcagcccccgccccgccagccgccccgtccgggaggtggggggcgcctctgcctggccgccccttctgggaagtgaggagcccctctgcctggccaccgccccgtctggaaggtgtacccagcagctcactgagaacgggccatgatgacgatgggggttttgtcgaatagaaaagggggaaatgtggggaaaagatagagaaatcagattgttgctgtgtctgtgtagaaagaagtagacataggagactccattttgttctgtactaagaaaaattcttctgccttgggatgctgttaatctatggccttacccccaaccccgtgctctctgaaacatgtgctgtgtccactcagggttaaatggattaagggcagtgcaagatgtgctttgttaaacagatgcttgaaggcagcatgcttgttaagagtcatcaccactccctaatctcaagtacccagggacacaaacactgcggaaggccgcagggtcctctgcctaggaaaaccagagacccttgttcacttgtttatctgctgaccttccctccactattgtcctatgaccctgccaaatctcccaatgcgagaaatacccaagaatgatcaataaatactaaaaacaaaaacaaaaacaaaaacaaaacaaaacaaagcaaacaaaaaaaaattagccaggtgtggtggcaggtgcctgtagtccaagctactcaggaggctgaggcaagagaatggcgtgaacccagaggcggagcttgcagtaaaccgaaatcacgccactgcactccagcctgggctacagagcgagactccgtctcaaaaaaaaaaaaaaaatctgtcaaatgtttgatgttataggagaagcccgaatgacatattctgacagcaataaaattgtactacatttcacaccatactgatcagaggagccgtctgaagaactccatcttcggacaactcctctggctgggccagtgttctgataccggtgccatcctctcccagactcaggagaacagagctgtggcctgctatggtgagatgccttatagtttgcaacccactctgctctcagacacatcacacccctatcacagtcctcaataggttcacactggccgtaacattgactcattgcaatgccaggggaagatatttagcacatcttgaggttaggtggggaaatagagcctcagaaaagttgacaaaatggtcacacaggtagaaagtggctgaatccacgcaaatccaagttttgtagattcaaacttccatgctctttccagaggccgatccagatcaagttatacaatcctgtgttcattacacgtctccggcttgcaaaaccagaaaggaacatcagggtatgctgtccacgctgtatcccctttcactgttgtgtacacccacacgctgcctggtcccatgacagaatgcgcacaaacgtggcatgcatgagtaagtcagaagaccagtgtggacctggtttcccatcccactttccccagggcagctgtgtgacatctggcagagcgtgtcacctctctgagcatctccctcatctagaacctgggggaactgtatctgctggttcccaagggccttttcaggcttctcctgagaactctattatgctacttggagccacgtggcctctacaaattctcgctacactggggaattaagaaaaggcaaactgaggaggagaagatccaaaacaggaaactgaggtaaatccccggaaatcaagaaaaactcacttcccacagagctcatctcagatacttcccctgcccaagtggctttctcttctttccagacccttgggtcatggtgcgacccagactcactggatgcatgaggaggactgatacacgggaagacagaagaatcccccaaatcccccccagagcagagccaaaccctagccaagcaagaggtcatccaaggaagatttctcctcctgcaggagtggcggctgcctcgcactcaacctggtccaattagcttcgagcatctgcatcaaagataaccagcagagccctggttccaactcacctcagccttgtggtgtgtccttatgcaaatctgacacgctggtcattttctgccaccatccccacatccgctgcttccccgtggcatcggctaattcactgtgcaaagcagcatttatatatagaaagttgcagccacgcaggttagcattaaaatagagacttgacgttgccgtggcaaccaaacaaatgatattcaaaatgaaagagaagtattctgcaatcgggaaagcatgtccacagccttccagggcagctgggccctttccccctgagggtgggtgggatgcctctggagaagtgcctggtcctgatgaacctccacctccccattaggtcacccactctgctttcagcagcagccatcatcccctgcacatgctccttccggtctagagtggacccaaggccaagacactgagggagtgtgataatccaaccaggtagagcaatttgcaaaaactctactccttaaagcgccgaggagaagcagccctggtgctttagtaagggtgcttctggaaacaaggctggccttctgccactgcctgccataacgaagagtcgagaggccaccagctagccgagtgacactgggcaggcttctgtacctctctgagcttccagcttaaaatgagctgggagtgggaggagggagcagcagcgcagggtcttcaacctcatgactccgggatgtgcaacttttccctgctaccaccacctcctttttctacattcctcttggatattgctgaagccccagggccagacagaagttactgattcccaggtctggcacatggaataaccctgtcactttcattctgtacacctggccaccacccagaaagcccgcagtccccaagacagaatgcctagattctggtcttcaaggagctaggggccttgaacaaatcttggacctttctggggctcatttctaaatgtcaaaatcaagtgttatctagaaagactgaaattaaaaagaatgacaataccaagtgccgacaaggatgcagagcaactggaattctcacacgttgctcgtgcgaacacaaaatggtatggtccttctgcagagcagtgtggcagtttcctgtaacattaaacatacatttaccatgtggcccagcgatcccacatgtagcctgtgtttctgaaccaggggcgactttgtcccccctgaggacatttggcaagccttggacacatttatgggttgtcatgacggaggtgggagaggctgagtgagtgcattagctccctgcagagacctctgttgtttccaaagagacacctagaaccaagagtatctctgacctaagctgagggctagagagtggccttggctgtgcaaatccaccgaaggctctgtaaatggtctcccttctgacccagcccaagctcctaagccaggaccaaaactgactgtgccaatctgcttccctctcctggagcagttcccaaaccaaatgcaaacctcatggttgccccactgaaccctggaagaacacaacttcctacttacccagaacaacaacttcaaagccactttgcgtggttgctggctccgaagccacacagagatgacggattacaaggaagaaatcagaaccatatggatttcatattcagcaaaataaacagaattacagcattggggttgggctcaagaaaccaggggactgtgtgtttggcccagagcccaggcttggtggcccccagcatgggctgggctctcctggcctctcctccccacccatgactcccacaaacagcgccaggggcgtccagcctgctgtctgcccctccttgccaaggccccagcaagcaatcctgcttcggctgacattttcgtgttttattgagtttttttatatcctcttttatggcacagttgaagatagttcagcttcttttctagcttcgtccaaagatgcacacaagcaccgacaggaatgcggtgtcgttaatgacagtgtgacagctctggagcctctggggggaagctgtaggaaggggcagctgtggcacccaccccctttcaggcccctggttcatttctcccacagcgaactgtgctgggcgttcccactcccagcctccctctcaggccagaacagaggaactctttcctctcctggtttctaggggaacaatatggcactccatgtgtagcctgtgtttctgaactaggggcgctttttccccaggggccaatggggcaatacttggtgacatttactggccaaggacgctgctaaacactcaacaatgcacaggaccgccgcccacaacaaaacaaccatccaacccgaaatgtcaacagtaacatggccgaaaaccctggtacagacacactgaccaggcttcagttggttcccggtgcccccgacccaggtgcatgtccacggagggatcaagctcaggacttttagagatcacagacaagttctgacctacatgaaggaggaaatttaccattctggtaattactttaaagtaaattctaggctgggcacaatggttcatgcttgtaatcccagcactttgggaggccaaggcgggtggattacttgaggtcaggagttcaagaccagcctggccaacgtggcgaaacctcgtctctactaaaaatacacaaattagctaggcatggtggtgcacacgtgtaatctcgacaactcaggaggctgagacatgagaatcacttgaacccgggaggtggaggttgcagtgagccgagattgcgtcgctgcactccagcccaggcgacagagtgagactctgtctcaaaaataaaataaaatagaaaataaaataagttctacaactgatcgagatatcatttgatcttccaatgattctccatggatatagagaaaagttaaacaaactttaaaaacataaaacacatcttgcccatagaaaccacacgaacacagtgggcacagatcatttaaatatcctgatgtgaataactttaaataacacagctaattctgctttgctggtgggttgctttttggtctcagaaatccctgaaccagcaaatcagggctgctcacatccctattctctccctttcctttcttctctcccccaggagtgctgagccaccattagctgacactaattcctaatgaccctgcagatctcagctcccaccgcaaatgccctctcaccccccaggatcctgtgggtagccgagcagtcctgcaccacgtgagtgaggcctgcagtacttggggcagcccaggggaaggcagggatgtccagggagctccatccacactgtgcagacatcagggggcacacagtaggatggacccctccccacagcaaaggcaacccttgcctcgctctgtgctcccacttacctgctggctgggtttgccagagtgggccaagaaagggaagcagagtggctctgtggtggtttcatggggtttcccctagaggaacagacaggcagaacttgctaatgccacttctttgtcattcttgcaaaaggagttcctgctcctgcctacctccatcaaaataataggcaacggcatggtggcacctggcacgtgtgtgtgcgcgcgcacgcgtttgtgtgtctgtgtgtgtgtgtgcgtgcgcatgatactcacaaagacgtccccatgtcctacacctcaggaggaccccttccatcctgctctctctgctgaggaaacctcttatttaacttctcagttgcaatgatccaccattttctgccaaagctaccatctctgctccaaagcagagaagcagcagctccggcaaaaccctgacaaatcatctagtttctatgattatgcttattccagagaatgaattcaaggttcaaacagttcggcagtttgccccaggcaaactggggcagagtgcatacacttaaacagctaataatggcggtgccgagatcagggtgtcagggtgaggatctcatccaaggtcaggctgctaacaagatacgacactgagggctcagccctgcacatctggctctggaactcttaactcatcacctccactctaacctgttcaccacggcagcttcctgaccaccgtctagtatggctccaccctgggtcaccctccctggtcaaatgcttccttcaagacactcaggtcatgggcttccccttgcacgggtggtgaggggggcagaggaagcatctttttttcatccagccacagcagtttctttgttgcctcaatgcccctagtgagtcacctcctccaaaggccattgccaaagagagcaccattttagcacgagcgctcgtccccacttcccttttccatttcccaacatggccctcaccagctcgaacattagtcacacacgtgccaacagaagttcaaagatgctccgataatgtgatttgtaaacacgaagtcccagcagcggcggctgctgcagcttcttggctctctcactcaatcccctacaccttctggggcctcccagattgacgttttcatttcccgggctccacgacacgcagggactgtgagtctgcttttcacacgtgggagtctcgtgccagaggctggggcagaggaaaagcctcacagcatgatctggcatttccaagcacaccgtgggggtctgtgacctacaaagcacagcaggctctcgtagcatctgtatgctgtgtgggcctgcccagcaggccatacgtaccccggcttctgaaagaagcaccctgatttttctactgtggaaccacctcacctcattctcagccctcgaggtttccgggagcaagtggctcctgcctggccaattagcacgtgccctctccccaaccacggtactagttcacgaaggggcatattacccatctggggctggatacctggaatttggttttggaattactggggaaagatgtattactatgacaagatgcaagcctgaagctgctgatggtcacgctgacaactcgcagaagtctcactgagaatggagccaatgcagaaggaagagggctgatgaggaagacagggaatcagagatagagaaacatcagactgctgacactgtttgtttaagccacttgatcaaaccatgcctgaagctgaacttcctgggactgttccttttttgtctgaatccaatttgagtgggatttcttttcactggatctcgctctgtccccaggctgaagtacagtggtacaatcatagctcactgcagcctcaaactcctaggctcaagtgatcctcagcctctcaagtacctgggactacaggtgtgtgccaccacacctagtgaatttattttttatttatacagatgggggtctcactacgttgctgaggctggtctcaaactcctgggctcaagtgattcttttgccttgacctcccaaagagctgggattacaggtctaagcctgaataggatttctgtaacatttaatagaaagagtcctggctaatagttccttggtaaagggcaaggtatacagatagcaacaatcaaaactaaagaacataaagcagggagaatttagagatttggttcctttcttgagcctgcacttgtgggtaagcttctcttccaaagatatctgcatttctaaaaaccttcctttggccactataacacttggtgtcttaaagcaacagaaatgtattctctcacagttctggatgccaagcttccaaaaattagtatcactgagctgaaatcaaggtattgatagggccatactcctcccagagggtcaaggggagaactcagtccttgactctttcagctcctggtagccgctggcattccttggcttgtggctgcatcactcaaatcctacttccccaatcataccctttgtcttctatctacagtcaaatctccttcagcttctctcttataaagatgcttgtgattacatttagggcttactcagataacccaggaaaaccttctcaattcaagatccttaacgtcattgtacctgcaaagactcttttctaaataaaataacattcccaggttctggggattaggacgtagacaatcttggagagccactatcagctgccctcatcaggccaagttggaccatggatcagaaatgttgctgtcaatacctctgatgcttccccaggtcctcctggctgggacctctggggccaactgtgccagtcacataacactggaagaagaaatagccagaatgttggagctggactcagagtggaagatatgcaagagcacagagtgccagggaggttcagcaggattgggagccccaaaggaggtctatccggagctcaagttagggggctgtatgcttggggccaaaatgtaacttgaccttgagataagatgaagggaattacagtatacccctctccataaccccatttccccagtgaccagattgctatggcgtagggtaggaaggcaccatctgtagtggaaatgggagggagaggaaagtagggactgaagaagcacaagagagactgtgacaaggagccaaggccaggctaatttgtcgcccaagctggagtgcaatggcatgatctcggctcaccacaacctccgcctcccgggttcaagcgattctcctgcctcagcctcctgagtagctggaattacaggcatgcgtcaccacgcctagctaattttgtatttttaggagagatggggtttctccatgttggtcaggctggtctcaaactcccgacctcaggtgatccgcccgcctcggcctttcaaagagctgggattacaggtgtgagccaccacacccagcctggccagactacttttttttgttttgttttttgttttgcagagacagactcttgctatattgcccaggctggtcttgaacagctggcctcaggccatcccctcacctcagcctcccaaagcactgggattgcaggtgtgagccactgtgcctggcctacaaggtcaatttttttaaaaacagttaactgtttatttcaaggtctattaattaggaaaaaacatataagtagtttgaaagcctgagatgtgactgtcattctgcaggacatcaggacagcctttctctgcttggattggctcctggggtcactgaattttggagtcagggggagcatttctaggtcaccaagtcctgacagtgtagtggtgaagagagtagacttgggagccagactgcctgggttcaaatccatgctttcccaggacaagttgcttgatctagctggacaatctcaagtcagcaattcccgtgaagacaaaaaataataatgatgatgtaagtattaataataatacctgttacaaggatcaagtgagttaataatgtacacaaagcattaaaaattggcctctctttgctgacactgcaggcaagtgatagctccttctcccagctccatggttctgccatcctttacaaaaggctctgatgaaatatgggggagggatggggtggcgggagtggagtttccagcccaccacagcagaggctcctctgccttccattttattccaactcccttcacttcttcatgcagacaagtgtcccacttcttttttttgagatggagtctcgctctgttgcccaggctggagtgtagtggcgcgatctcggctcgctgcaacctccgcctcctgggttcaagtgattctcctacctcagcctcccaagtagctgggactataggcgcatgccaccacacctggctaatttttgtagttttagtagagacggggtttcaccatgttggccaggctggtctcgaactgctgaccttgtgatcttgcctcagcctcccaaagtgctgggattacaagtgcccgccaccacacctggccaagtgccccatttctgagcttacctcagccctatacccccaccccctctggctagggggtaatcagaaggaagaccaataggaccaatgctgaatacctgcctggtgattcacacagaataatcaggccaacctcaagctaggaatgtctgcaaacacctgtcctagtccccctacaccatgacagttctttgaaaatacatcccagacactctccattaaccctgcccagccctggttcagggtgggcctgatcggagaccatcaaccatctcctgtaagtctaaacagaggctcagaccgggagaaatagattcatacataactgaatcaggtccttcggaggaaagttgatatcaacattccttaaccttgacactaaccactgaggtgtggtcactgttacgttttgtaaagaatcggggtgtggcctctctgatattataggtccaaaccaatggtctctaccttggtcattcccatgaaaactattttgggattgtgctctgtccttcagaggcttaacacaaaccatacctgagacttcagccacacataaacacactccaatacttcctcccaaaccttttaagctgctttgtacgaagcacagtgacatcacacagcaccccaaagagggacaggcacccccatatgcacttgataggccggctcttcccagaagcatcatcaactccttcagggcgcttccctaagtttgatcctaggagaacttctgcggaacctttgctagaaagcccctgacccattgaaccaggatgacccactgacccagatgaagccctgggtttccttccctgacctgaaaacagaggcaggctatgctgggagttcccaaaaccaccctcagctctgatgtttcccagaaggactcatgggactcagcatatgttttacttctggtaaagacttatggccagacacagtagctcacacctgtaatcccagcactttgggaggctgaggcaggaggatcacttgaggccaggagttcaagaccagcctagacaacatagcaaaaccctgtctcttaaaaaaaaaaaaaaatcacaaaattagccaggcatggtggcacacgcctacagttccagcttctcgggaggctgagatggaaggattgcttgagcccaggagtttgaggctgcagtgagctaggatcgtaccactgcaatccagcctgggtgacagagtgagatcctgtctctattttttttttaagggtcttattacagcaaaaaaatacaaagcaaaatcagtgaagggacacagaacctgggacaaggtcctgagaaaaccaggcgcaagttcaggagtcctctcccagcagtcacataggatgtgcctaattcctccagcagtgagtcctggtagcatgtgtaaaacactgtctagcaggtaagctcattacagactcagtgcccagagtttttataaggagctggtcatgtaggcatcccctgcctagcacaaacatgaattgcagactccctgaagaaatccaggtattcagcacaaaccgtattactcacatgaacagtttagagaacagccacccttactattcagggaatagtgggagcccttcctaaatgcaagttcccagacaccagccaaggaacaatgttgccagcaggcctttctaaggagggctccccggcctgctacgttgactctctctgcaccatgtccgtggaatggttacttgaagggatttccccttttgtctgcccatccagtggcagaatcctgccactaaatcctcaacaggtgacaagcctctcaaacacttgtgcggacagagagctcactccctcacaaagcttcctcttccatgttggcctgtgatccttgctagtccaggaacaccagcctctgagttcagtatttcatgccaataaacacttcacataataaccaccactactatgatgttgggtcaggccttgggccaagcacatgacaagcatgagctcatttaatattaatgttttatgatggagtcaactatgccttagagacgcaaagcgacttgcccaaggtcacagtgttaatgggtttgaactgtggtccatttgaccccacagccggagaccctgaacctcccacacccagtatctcccgggagcctatctttcactgatcaccattctaattttcagcatactctcataccactttttcctcttatttgctaatatttttagttgactcacttttttcttttaaaaattgcactgaacagaaaattgatgtgagtctgtgaatggaaaactagtgacatttgccagaaatctataataaccataaaaataaccacaacaaacaccaagcaatgttattcaatctttgctggatactgctacctgctgaggcctgccctcacccggcacctcccaaaactttctcctcaatgtaatcagaagcaaggagagaactgcaaaaggaatacccttctcttgatgtgattcactggtactgaaagtctcgtccagagaccacctaaacccatcttggcacagcatctcgggaaatgctatactagaccataggcactagatgacctgccctgttgagctcattagtcccagcagggactcctagctttctatgcaccccactcctctatccccagtcttgaggtttgttccatctccttcctctctcattcattctcatttattcgccaacttttgtggccactaagtcctgggaatcatccagccaccagcctgggtcagctgcccagcctcccagcccagctctcccttcgttctctctcttctttttttttttttttttttttttttaatttttaatttttggagatggagtctcgctctgtcacccaggctggagtgcagtggcacgatctcagctcactacaacctgcgcctcccaggttcaagcgattctcctgcctcagcctccagtgtagctgggactaaaggcctgcgccaccatgcctcgctaatttttgtatttttagtagagacggggtttcaccatgttcgccaggctggtctcgaactcctgacctctggtgatctgcctgcctcagcctcccaaagtgctgggatcacaggcgtgagccactgtgcccggcctcccttcattctctttctgttttcatgggttctgctcagcttaccaggctactagcctggtcttgcagagagaaaatgccagcaaagatgccgtccctcctgccctattctaaatctagagtctagggagagggaggcagaggcagaatggggacatcacaacctatgggacagaggttggggtggtggcgaaggaagagcatacagagagtagaagtcagaaatgtgctattaggttggtgcaaaagtaattgcgttttttgccattaaaaatggacaaaatagcaattacttttgcaccaacctaaatatttctctagaaaccagggactcccacatccccatccctgtctgactcctacacaatcctctggcctggcatctggaacacctgctcagcccaatcatgaactcaaaggagccacctgactgggtcagagggtcccacacagaagccagttggtggggtgttcccagccagcaggaccccaaaaaactccaagcagagagagccagtgaggcgacttgagagctcaggctcatgaggcaaacagagctgtgtttgagtcccgactccaccatccccttgggcaagtggctttgcacatctgagaaatggaaccaaaaatatcacatactactcagggttgttgtgggaagatgcgaatcaccctgggtctgtgcccaggatacattattttcccagagctggctgtaggactggggccacaagaacagaaaatgggtgaaggcaaagtacaagtatagtcacccccatgtcacagagaacagccagacatgaggaggtgggtgcaatcggaggcagcgcagacagccgagggctcaccctgcagaccagaggctgcctacaggaccactggatgtgctttgcttgacctgcagacctttttaaaaaaaagttttgacttagcttcaagcatacaaaaaccaagacaggtcttgtgaaaaaacaaataaaggccaggcgcagtggctcatgcctgtaatcccagcactttgggaggccaaggcaggcagatcacctgaggtcaggagttcaagaccagccttgccaatatggtgaaaccccttcaaataataataataataataataaacaaaaattagctgggcatggtggcacgtgcctggaatcccagctacctgggaggctaaagcaggagaatcgctggaacccaggaggcggaggctgcagtgagccaagatcgcaccactgaactccagcctgggcaacagagtgagactccatctcaagaaaaaaaaaaaaaagaaaagaaaaaaaagaaaagattcagttgtctcttgaaaagtcaggtggaccatactgcaggtgctatcgacaggatgaggagaaatgctgccacgttctccaccattctctatcacagtagtctgcaaccctggctgcccatgagaatcacctgagagcttagaaatgccctaggaagcccctgtcccattaaaccaggatccctagggctggaggtagggggctgatctgaagtcattggccctgaggaagcacctctacctgcctcactcagcgctattacctgccgggcccagacactatctgccccgatacctggttcaggcaagattcaggaataaggaaagactggggccccagaagacaaacccagcacccaggcccctgctggcagccccagctttaacttagtccactccacaatgtcttcactggaggggatgaggagctggcttggcatccctgttcccctcccccagccttcgcccatggctgcattacctctgtccaccctgagaaggacaaagctcctgaaggccaagactctgtgtagagaagagccaaggcaggagtcccatgagcattcaagttccaggttctcctgctgtctaacagatgcttctgccttcaaatatgctttctgtaaaaccctagagccacaccatcgccttagaaacctctggttccatccctctctgatagaagcatctatctgtccacaaccctaccccgatccacaggagtcaatataaatgtaaggtaaagaacagaccagacggcttgccagcaccgtttccgagacgtgatggggagagaggctcagggaagtgctggcgcccatagtctgtctggccccaggattggtgcattagtggcttatctgcaatttggggtatttcccactggttttgtgccatttctctaaaaatggggaactaaaaaaaaaagaaaacaaaaacaaaaaaacaagaaagtggtgtcatcactcccaggtccattccatcattctaagtaaatggagcaaagtggtctatgtctaacccagggcaggtggcacgatggaaatagaaaaggtggccctccccggcccaggaccagagtgacagcaaggcaaaggctcgctggaatgaggcaaggaaatgggattttgattgcatacacaaagcgtggcacagccagagaacagtgacaagtgacatgtgaatcacacagatgagggcttcccaggactcgacgtgtcccaacaggccgtgtggctcagccggagaaacaagaaaatgagggcagatgtaatcactatgcaggtacctcagtgaactaattccaccccaggggctctgacacagctggagacaggcctgtttcgggatgcacagtttaaagtcaaggggcactcctccccagccagtgcaggcttggatccttcacactcactggtaacaatcctggaagtcagaacacaggacttattctccaagcacaggatcattttgctgtcctcaagcacctggggagagcaggtgacaatctacaccttgctactgaaagccttgctgttatataagacgtggtccatagaccagcaacactgagcttgttagaaatgcagcatctgcgccccgctcccctcaagacctcctacatcagactgtataacaagtgcttcaggtgaatcgtgcgcacattaacgtttgagcagcactaatttaaagcttatgagctattttaccagtgcacaagggaatttctaggtactactaggtactgatcaagtgcgtgacagctacacgggcgcttgaggaatttcgagacagtttcagtcgaggcatctcaccctgacttttttctcaactgaattcaaggctgcagctacttcctcagttctctaactcacttatcaaccaaggcaatctcagatgaaaatgttttcccatagccattgagcctggcagagtaacatctcaggatgtatttatccacctgtttacttatttatctgtgcttcatgcttactcaaacatttattgggcacctactatatgtcaggcgctgagaatatgcagatgaatgaccccagccctgtcccaggcagagcttactttctggaagagagaaagatggcaggcagccacgcagcagtgtgatggacgtatgcaacgataacaggagaaagcaggtgctgagaaaggagtgggcgtccagaaagttcctgggaggggggtgctgcccaaaggtcatcgtaaggacaggctttctccttgccaggcttttctctgcttttcttgctccctcccatcttgctttctgctggattgattgcatattctttattccccctccctccacaaactttgcatttatagagtctatttatactacttaggtggttacactgacatttttaacatgtacacttgacttcaagcagaaagctaatcaatagctcttttctccttctgaataatacaaaaccctggaagggtttcacttcgatctcctccctcctaccttctcagtgttggatagcaatgaatcagacaaagatgctattttcccccaagttctggaactccctggttatttgttctctcctgccactgacaattttccaggaaaataaaaattccaaattgactcaagaggaaatagaaaacctgaataggtctataaccttcaaacgaattgattcggcagtctaaaacctaccttaaaaaactgtacctgtcggtgtggttttactgataagttttctcaaatcgttaagaaaaaaccacttaatccaatctcttccataaatagaaaacattcagctcctttttataataccctgatatcaagttcaaagaaaaacaattgggagaagaaaggaagtaaaagctcctaacctcacttagagaataggtgtaaaaattctaaataaacattagcaaatcctggaaatgcagagatattgaaatatcagaaaacttattaaactcaccatatcaaaagaaactacaaaaaaaaaaaataggataatctggatgcagaaaaagcaccggacaaaactcgacactcatttgtgattaaaacacacacaccaggactaaagtctgataaattataactattgaaaattaagggctgggagcggtggttcacacctgtaatcccagcactttaggaggctgaggtgggcaaatcacgaggtcaggagtttgagaccagcctgaccaacatggtgaaaccccacccctactaaaaatacaaaaattagccaggcgtggcggcacacacctgtaatcccagctactcaggaggctgaggcaggagaatcgcttgaacccaggaggcagaggtgcagtaagctgtgattgtgccactgtactccagcctgggtgacagagcaagacactgtctcacaaaaaaaaaaaagaaaaaggaaattaaaataaacttcatacttaatggaaaaccctggaagcttttctgttaaagtcaggaataagacaatgccattcaccatcatggtttcctttctgcactgaatatattataacacagtgaggcaacaaaaagaaataaataaatgaaataaagcctctaatcccagcactttggaaggccgaggtgggaggatcacttgagctgaggagttcaataccagcctgggcaatatagcgagaccctacgtctgcaaaaaattaagaaattagatgagtgtggtggcacacacctgtggtcccagctactcaggaggctgaagaaggaggatcacttgggaccaggagattgaggcttcagtgagttatgactgtccccctgcactctggcctgggtgacagagtgagaccttatctcagttttaaaaaaaaaaaaaaaaggctgggagcagtggttccttcctgtaatcccagcattttgagaggctgaggtgggcaaatcacttgaggctaggagtttgagaccaacccctcgaccaacatggtgaaaccccacccctactaaaaatacaaaaattaaccaggcgtggtggcacatgcctgtgatcccagctacttgggaggttaaggcatgagaatcacttgaacccaggaggcagaggttgtggtgagccaagaatgcactattgtactccagccttgggaagggaagagggaagggaaagtggaggggaaggagaggggaaagggaaagggaaaacgaagggggggaatgggaaagggaaggggaaagggaaagggaaagggaagtggaaagggagagggagaagtgggagggggagggggaggggagagggagagggagagggacagggggacggggaaggggaggggagacggggagagggggagaggaggagaagggacgggaggagaagggaggggaggggaagggaggggagggggaggtgacagaaatgcaagggggacagaaaaggggaggggaagggggaggggaaaggaagaaaaaagaaaaagagggaggcggaaagggaaggagggggagtcgggggagggaaaggaaaggaaaggaaaagaaaggagaaaggaaaagaaaaaaaaagaaaagagattgcaaaggaagaaacggctgacatattcatacattataattgtctacccctccaatcaagaaactctacaaactatcagaactaataagacagttcaagatctagtgataaaaattaccaatattctacagtaactaactactgaaggggtaaaggatatgccatcacaaaacatgccagattgttatactgatgatttcaagttgaaaacattggagaaactgtagtttcagaacggacgagctgaactgtctcttcctgcatgcaccaagcaatagagaatcctgtacgagggctgccctcccagtaccagggcgagaaaacagcgcatatcaccagagccggaatcaagcctgcaatggacttgactaaacatcatgaacagaataactcttacatttcacctgttttaccccacctctaatacaacttctagtgactccgccagaaaattgactgccctttgccatattttgttttgttatttctgatcaagtttatcactctatctaaaaagtataaagatatgttgctttggccacttctttgggcttcactgtcttgtgaagatcccatgtacacataaaactaataaaatttatatacttttctcatgttaatctgcctgatgtcaatttggtttccagatccagccaaagagcccgttaagagctaacaaggaggttggaggtgatctctggttcccttacactacagtaaacgacaataatcagaaaatgtaataaatacttatgattaaaatggctgattgaaaacgggctgtttatatccatgccctcctaaaaccccattaacaaagccacaaagaagaaaaaagtaagagttgacaataaatgagacatgtcaacataattttggacaatggaaaacaaatggataaatggcaaggacttagcatagatgagtgaacagaaacctgtatgtcttcttgtatgacaagaaatcagcagtttataatgcagaagctcagaaaggcccaggaaggctcacagcacaaagtatctatgaggtaaagacttaaaaaggaggctggaggagagcttacagattcctccacaccctcagcaactaagtgactgccctatcccaatggcagaaaacaacgggttgactctcaaggcaaactagtcctgagcttctggactcagagacacctagaggacaggtaacaagccataatgaaaacagggcaatgaggcaacttgtttacatactgcagattaagatcagaccaatttcctttttcaggaagctactgcagggtgtgatccaataaaacaagggagaaaaccaagaaaaggggaagacatgagatctaagaaatgaccaaaaagcagacaagaaagaaagaaataggatgatggtgaaggaagataaagatgacaactatttatcagacttgaagagcaacagaccagaacagagcaaatagatgcttctattgagatgaaaaaacagacctgatagattattttatgtggtgataggtgacagtacatgcggaagtttgttgttttttctgttgtgtgtgtgtgtgtgtgtgtgtgtgttttgttttgttttgttttgttttgttttggagacaggatctcactctgtcacctaggctggagtacagtggtgcaatcacagctcactgcagtctcgatctcccaggcttgagcaatcctcccacctcaggctccccagtagctgaaactgcagacgtgcaccaccatgcctggctaatttttgtatttttagtacagatggggttttgccatgttgctcaggctgctctcaaactcctgggctcaagagatcaacctgcctcagcctcccaaagtggtgggattacaggcatgagtcaccgcacctagcctgtggaagtttttaaagggctagtgaagagagaagaattggtgcaagggacagagaaaaccaagtaaataaaaccaattgcttttgtttttatttatttgctttcttgttgttgttccaccaaagaagtagaaggcaatcagtagctcagttgtaatttacactggcataataatataaacaccagaccctgatatcaccataggaccaccattgtgggaggtgagggaagaggttatatatggaggaaaggaaaaagtaaagtgttggtggaaaagccaggtctaatcttctgcaataagaagttcaatagacagtgtgtaaaattggtaggtagggggatatacaacagtataaacatatcatttagaaaaagggccaggtgcagcagctcatgcctataatcccagtgcttcgggaggccaaggcgggaggactgcttgaggccaggagttcaagaccagcctgggccacatagcaaaacctctatctctacaaaaaaaaatttttttaattagccaggtgtgatggtgcattcctgtagtcccagctacttgggaagctgaggtgggaagatcgcttgagcagagaaagaagagaaagaaaggaaagtaatcagatgatggtgaagaaagatcaagatgacaactgttcagacttgaagagcgacagaccaaagcagaggatgcagtgagctatgatcacaccactggactcctggctgggtgacacagcaaacccttctctctaaaataacaaaaaccccaaatggagataaagccccattgttacaagtggtggactctgagaagcatttggggtggagtatggtaggagaatgctcttttaaaactctattactttgataaaaataaacataaacactgtaaaccgaaaataaaattctaagtccttccaactatctgaatggacatcctccttggccaggatactctaaagtttaacctgaaagactggttcagatcatgaagggaaatggggatcagacatgcttcattacaaccctccagcattaacttcaacacagaccttatgtctgataagaaatacttacaacctattctctctgaagcctgctacctggaggcttcatctaaatgatgaaactttggtctcttattgcaacattcctttctattgataagtctttcaatcaactgccaattagaaaaattttagatctacctataacctggaaaccccagcttcaagctgtcccacctttctggaccaaaccaatgtatatcttaaatgtatttgactgatcatatctccctaaaatgtataaaaactaagcggcgccctgaccaccttggccacatgttctcaggacctcctgaggactgtgacacggtcatggtcactcatatttagctcagaataaaactcttcaaatattcgacagagtttcactcttttcattgacaacatcaaatttaaagaaaaaaaatacaccacgcacaatggcaacaaaactataagtgagctatgagtaaatataactaaagagtaaaagacttatatggagacaatgtaatgtactgactttggaggtgtttgaaccagagtgactccatcttgtatagaggctgggtaaaagataagtctgagacctactgggctgcactcctagtagatttggcattctaagtcacaggatgagataggaggtggccacaagatacaggtcataaagaccttgttggtagaacaggctgtgccaaagaagccggccaaaacccaccaaaaccaagatggcaacaaaactgacctctggtcatcctcgctgctcattatacgctaattataatgtattagcatgctaagagacattcccaccagcaccatgacagttgacagatgccaggaagttaccctatatggtctataaaggggaggagccctcagttccaggaactgccccctgcccctgccacctttcctggaaaattcatgaataatccaccccttatttggcatataatcaagaaataaccataaaaataggcaaccagcagccctcagagctgctctacctatgaagtagccattctttcattcctttactttcttaataaacttgctttagctttactccatgaactctccccaaattctttcttgcataagatccaagaacgctgtcttggggtctggttcaggacccctttccagtaacactgagatacaataaagaagatctagatcaatgggaatatacaacttgtttctagataggaagcccaatattaccaaggagatctttcttctcaaattaatctcaaaacgtagtgccattttaatgcaatagttgttcatagaactcaaggaggtaatcctagaattcacaggaaatagtcaagggccaagaacatccaagacaattttgaagaagaatgaggacttattccatcagatagtaaaacttcttgcaaagttacaattaaaatagtgaacagatagacaaatagtccaatgaaaccagaagaaagaccccagcaacagaacacacatttataaaaacatacagcaaaggtggtcatcaaatcagcgaggtgagaatagagggattttttaaaataagtaataacaagatgacaggctcctcagaaaaagagtacaattgggctcttgccttataacaaacaataaaaggaaattacaaatggatcaaagatctcaacatcaaacaaaaatctttaaaactttcagaaaagttaagaccatatatgacctcaccataagagttttttttttcttgagacggagtctcgctcttgttgcctaggctggagtgcgatggcgcgatctcagctcactgaaaccttcccctcccaggttcaagcgattctcctgcctcagcctcctgagtagctgggattacaggcatgtgccaccacacccagctaatttttgtatttttttgtagagacggggtttcaccatgttggtcaggctggtctcgaactcctgaccttgtgatccacccgcctcggcctcccaaagtgctgggattacaggtgtgagccactgtgcccagccaagagttcttaaatgaggcataaaaagcaaaatccctaaagtaatcgattaataaatttgactagattgcaacaaaaaagttttgcatgacaaaatacatcattagaaaatgaagcggtaaagcaatgactgaaagactgcgaaatagaaaaatgagcagagaatgcacaggaaacccacaagagaggaaattcaaatggtaaataaacatttgaaaacagacacgacctgactagcaatgaaggaaatgcaaatgcaagttaaatccaaggtgtggtatttcacaccctcggatggcaaaaataagaagtctgatgtgttggcaaggcaaatggaaattctgatactctgtgggtggcagtctgcatttgcaaaacctctcagaaaaacaatttgacactatttaggaaagtccagatgtacattctcagacccagatattttccttctaggtatatggacccaagaaatacccaggccggtacacgaggggacaggcataaggataagcattacaccattgcttagaatgacctaaagtgtccaccaatggagataaaggtggcccatgcacatgctagaacagtacgcagcagttaagatgaactagctctacatgcaccaacacgaaaaaaactcaaaaacacattgtgtgaaaaaagtaaattaccaaggtataaatatcgtatggcacatctcatgtaagtttcaaaacaagacattgctaaacagtattttggatatacacacgttaataaagattttaaacatgctcatgggaaacacataccaaccccagaacagtggttgcctccaggaagagaaggaaagaagggaaaggaattggaagaacacacaggatttttaatgtcaaataatgtgttatttctgactgacatgtggccaatgttaatacttgtcaaatccagagatggtaataagcacatgaaaaatgttcagcatcatcaaccttcaggaaaatacaagataaaagcaccatgggaaactacatcatactccctagaatggctaaaagaatttttgttaatgctggcaaggaggtagaacaacagaagctcatacgctgctgtgatgaggaaattgaagcagtgacttcggaaaatagttttgccatttcttataaagttaaatgcatgcttaccatatgatccagcaatttcactcctacgtacttatgccagaaaagtgaaaatgtgtccgaaaaacctatacacaaatgttcacagcagatttattcataatagctaaatcatggaagcaacctaaatgtccatcaattgacaaaaggataagcaaattgcagtaaattcaactaatggaattctcattagcaataaaaaggggtgaaccattggtacaacaatgaggatgaatgtcagacattatcctgtgcaaaagaagccacattcaagagtacatactgcatgacacatttctgtgaaactctagaacaaacaaaactaacctagaggatagaaatcagattcagaagtgacctggagagatgagtgggtacagaggagagaaactgactgcaaaggggcaaaggagagctttctgggaagatgtcttacacactgactaattcaagtagtggttgcaagggtgtatacatttgtcaactcattggcctgtacgcatgtaataaatttcatgagaaattatagctcagtaaagttgattttaaaaatacgaatggcagatacatttgttaacatctctgtaattttctgtagacttaaatattttattaaaaattaaacagactttaggccaggtgtgatggctcatgcctgtaatcccagcacttgggaggctgagatgggtggatcacttgaggtcaggagatcaagaccagcgtggccaacatggtaaaaccctgtctctactaaaaatacaaaaattagttgggtgtggtggtgcacgcctgtaatcccagtgactcggtgatgcaggatttttctcggtccctttgccagtcagggacttctggctggcgatgccagaggccttgcccagggcatgctatctgccgcaggaggtgccctgcccagttggccttcccaggccaagtctggcttgtgcactgattcccaagttcttgtcccacatccaagaagaatgaggatgcactgaacattgaagtgtgaggaggacagagaagaattttattgaatgatgaaacagctttaaatacagaggggacacaggggtggtccccctacctgaaggcaggaaagtcccccatgtggctgggtccagggccttttatggactcagaatggggagtgcatgctgattggtttgtgagtatgcaaaaaaggttaaagcaaagacaccacgcagaagtgggcctggcagtacagaaaaccaattaggaaagggtaggtatacataaaataggtgaagggtagggatcaatcagaggaaagcacaccaaacaggaagacaagttctcagtctggtccaaggatttaaatggtagcttggctttcaggatttaagctgtcttcggcctggaggtgaggtttcacagggacctgcccctgcctacctaggcattggctgcctcctgctgctctcacagggaggctgcggcatgaggattgcttaaacctgggtggtggaatttgcagtgaggcaagatcatgccactgcactccagcctgggcaatagagcgagactccatctcaaaaaaataaaaataaatataaacagactttaaaaatatgggttatcaatggcctatattggtgggggcaggaatttttagggggagaataaaaaactaaggtggtttacaatgttaattcatttcttcccagtggtagagttgtctatttaataatcatagtggtcctattagaagtcaaagggtccgttgagatcagctggtcctggcgtctctttttcagaaaagaggccccaagtgagatttgtccaagatcactacagcagatacctgttatttcagctgcccagtatcccttccctttatctttttttttgagacaaagtctcgctcttgtcccccaggctggagtgcgatggtgcaatctcagctcactgcaacctctgcttcccaggttcaagtgattctcctgcctcagcctcccaagtagctgagattacaggcacctgccaccacacctggctaatatttgtatttttagtagagatggggtttcaccatgttggccaggctggtcttgaactcctgacctcaggtgatccacgtgcctcggcctcccaaaatgctgggattacaggcgtgagcccccgtgcccggcccctttccctatatcttaatagcagcccgctcttttttaaggggattctctctcccctgctgggcactttctctgtagggctattaatccaggtgccagctctccacaacaaacgccaagcggtccccggtggctccttcacagggtacaggtgtgtgaccgatggccccctcaggacacttcgtgctgatactttaaattatgggtaagaggagcaagaaagggatgcatggaagtcatccatcctgacccacaggcctgaccatgctgtttttgctataagactgttcttattattcctacttcctggcctcacactgctgagcaccttggtttctatctgttttcaggaggtttccccggtctctgcccagtctataaccttccagtgtctttgcaataaattccacttggcttacatcagccagaatcagtttctaatatttataatcaaagaaccctgagtgacacatcacccaaccagcccaagggagaccaagcccacagcccagagttctggagtgtggacacctgtccttgggagtgtcagccacgaagccaacttctcaggatctcgatttccccacctccatcccctaggcctgctgggagacagaatgaaagaggaaccataccagccgggcgcagtggctcacgcctgtaatcccagcactttgggaggccgaggcgggcggatcacgaggtcaggagactgagaccatcctggctaacacggtgaaaccccgtctctactaaaaataccaaaaaaaataaaaattagccaggcatggtggcgggcgcttgtagtcccagctactcaggaggctgaggcagaaggatggcatgaacccgggaggcagagcttacagtgagccaagatcgtgccactgcactccagcctgggcgacagagcgagattccgtctcaaaaaaaaaaaaaaaaaagaaagaaagaaagaaagaaagaggaaccatcccttactgagtgatgtgacaagcactttgacacattttaatttagtccttccaacagcctagtaacatagggattatcccaatttacctatgaagacactgacgctgagcaagaaaaatgttttcccaaggtggcagagctcctgagtgacagagccagaattggagccaaatctgtctaacttgaaaaagcctagctcttgtcacttcatcctcctgcctcgcctcaagaaacaatcagtcactgagacttcaatgaggtgtcagaggcatgactggatgttggctgcacctacaacatattgaggggggtcaactgtgtacactgagccagggcacccacccaggcaggcgcgaccatgaatgggggcgcagagggtgggggtgaggagcagccttggtgcctgaggaatggtgtaggaaacatccttaccctggaggagtggaagtgaattctttctgcattgagatgaatacatgttcgtgttcccatggcaacaaagcatgctcactgttgtccatacctggaactgtgtgactcatttttggcagtgcaggagtcccgtccacagtcattagctaatcagcctggaatgtgtgcatgacagcactgatcatatctggggagataagcggggtctatgagtgtccccctgcaactctgaaggccaggattatgtctccttcattttcacccggcattcccgatccttggcatggtctctgttaccgaaccattgttaaggaatctgggtttgttctgggcttcctcaatcggcagaaagaatggtgacagagtttgagtgaaagccaaaggtagggtagggaatgaaacatggcatgaaaagggaagaaattggggttgtacaagctgttaaaatcactaggaactgctgggaggtgcagaattctgatttcagaccaaagcttattcattaatacaccttgaagggtggcatgtggaagaaataattctggcagatcctgccatgggtcaggtataatctcagagtgatttggttcagtcctaggcatttccagggaggaggaagaggaatcttggaagagacattacttagccaccagctcacgggaacgcatcacagataatgatactggagggagctgaggtcagggcagaagagccgtgtcatacaagccaaagcaaccccagtgtccctacaaaaagagggggtccagaggctgcaaggagcctatcagatcaacctagaaaatcttgagtggctccccagttatgaaataatgtcacaaacttgacaaaggacctctactgggcatcagcagagactgatcagggtctgtgaaaacatgtggttcccacttaattccttggaaggtggtaaagctctggtgtgcatggagaagaccccaaagggacaatccaccagaccaggagactgagatctcagggtgagttcagcctgagctcgccgggagagctctacacgcaaactcacaagagcacatgggttcagctacccccacttctgctaagcaggtagccctccccacaatgaccagatcactgatagagaagaactggcccagcatgttttctgaggcacactcatgatcaacaccaactcagtagctcttatcatcaaaggccttccttaggtgggagtatggcatgtgtgtcccaggtggacgatgagcttgtaagctcttgggacacaaagggccaagtttccttgtccacagcagccagcagccatggttgcatgctgcagacagtcaataaaggttcactgagttcactgatgaatgaagaaaggaaggaaggaggcaggggaggctttctggacagtttcctcaaatggtttgcaagccttccttaccacaggggactgaagcagtaagcgtcagggttccccgaacacagccaggactgttaccactgaactctgaaaagaaggctgcaatggggtcctgggggagattgaacatttctgaactctttatcatagagaaaaggaagcagtgctgaattccaaggcccttctcacttctaaaaatccacaggtctctcagaatcctctaagaaagtaagcgaaaataaggaaactgtctacaaagtggcatatttggaaggaggggagggagaccccaagagcagaggagtcagcaggggagcctttggtgcccccatcctcgctccagccagggaagacccacttcacctcaaatgtgcactagggtgctacacaatttcagtaaataaaagggaagaagggcttgggctgctttaaaaaatatatggatgcagcctggccaacatggtgaaaccctgtctctactaaaaacacaaaaattagccaggcatggtggtgcatgcctgtgatcccagctactcgggaggctgaggaaggagagtcagttgaacccaggaggcggaggttgcagtgagctgagattgcgccactgcactccagccggggcaacagagcgagactctatctcaataataataataataataataataataataataataaatatgtatatatgcataaggagtgagctagcacaaccctggctctgttaggggtaccactgggacaggccatgggtgaccttaggagggatagaggggcaggtacaaaaccccaggcagctggctgccaacaaccatcatttttggctctaacactccaatactctgagcctccaggctgaggcaatgaggggttcaggaaaaggggactcgagcatcccaacataaagttccttggccactctgactcttgttaaatctgtgcagcccgggcaggaggggcagttccacgcagcactaattgccaagcatctttttacgaggctcagccatgacatctaaatggattcaaggtaaatcctcacacagcctggtgtctttaacagggaaataaatcatcccaattatacagggcgagctgccatgctgtctctatttctggagcggttgcttcccatgctggaagggagggaaaatgcaatgtagacaaaaaacccagggaagggatgtcaagttcaaagggcccatttcagagcagggaaaagctaggaggagaggggggttcaagctgaaccatagcttctctgagacaagcaggatttgaaaagagaattaggaggccgggcatggtggctcatgcctgcaaccccagcactttgagaggctgaggcaggcagatcacctgaggtcaggagttcgagaccagcctgaccaatatggcaaaaccccatctctactaaaaatacaaaaaaaatgagccaggcatggtggcaggtgcctgtaatcccagctactcaggagactgaggcaggagaatcgcttgaacccaggaggcagaggttgcagtgagcagagatcgtgtcattgcactccagcctgggccacagagcagactctgtctcaaaaaagaaaaaaaagaaagaaaagaaaagaaaaaagaattagtgaaagttcccatgcactgtcttcccccatccagtcacccagagtgaaaaactaaatgaagacaaaataacagtagaaaaaaagataaggtcagggtgaactggagacctcttcaatccaatcctccagcacaaaatgcaagcccgcaaatctggcatggagctttgcagccagcaccaaaggagaagtgtgcttggctacatggtctgcagtgtcctcaagataaaataaaccacctgctccgggcaagcacaaccattcctgtgctaacaccaaaagaaattcctcctacgggttcagagaaagagaacacagtaaaaaaaaaaaaaaagtatttaaagaccatgagtttcatagtgctgtttattttaacccctagtttgaactaagtccttcagaagcattccatgggtatcacattctggctacagttcctacaacctagttgtcagtaaaggccctgctcacagaaggagtaaaaataagagaaccatcacacttggggagaaaggtaaggaggagaggcagtgcttagtgtaaagaagtcattccttgtctgttataacaggaacctggtagtttcaaagttaataaatcgagaaacaacatacaattgttgtatttaaaattctggaggcaaccaccaggagaactaaaagcaaacccttagaagtgtgactggaggccgggtgcagtggctcacacctctaatcccagcactttgggaggccaaggcaggtaggtcacttgaggccgggagttcgagaccagcccggccaacatggtgaaaccctgcctctactaaaaatacgaaaaattagccaggcatggtggcgagtgcctgtaatcccagctactcgggaggctgagacaggagaatggcttgaacccgggaggcagaggttgcagtgagccgagatcgtgccactgcactacagcctcggcaatagagagagactccgtctccaaaaaaaaaaaaagcagcatggctggaaaggggaggagtgaggtgtgagtgtgctgttttgcattctaagtccttcagtacaatttgattttggttttaacgatggacattttattcctttcgcttaaaataaaaactaaggcttttcagtttacagcatggaaaatgaggaaagaacacacaccaggatgcaatgtaaatgagagtatgtgttacaggaataaccttgagtttgtcctgatttatacacaaaaggagatctctcacaaacttcagaattagtaagaacagatctctgcaacacacctcacagccgacagagacacaagcatactacaccgtcagaatgggaaactgcaaatctaaacggctctttaaaatcctgaactctttcaaactccatcatgctagccctctctgcagctcactcgtggctttcagagcctggcagagagggaaaaattcaggttgtggtgttgcaaaaaaacacctgctttccctcaatgccagtgcatttcacaaatgacatcaatttcatgccagggcatgaaatcactgaagccagttaacatcctcagtttttggatgaggacgtggagtgcccagatagggagtgactagcccaaagtctcaaaacgacgggatggcaacctcagaacatgattactccaagtccaatccagcactccttccaccacatcagtgtgtgttctgaacacttcgacatgctggagagccgcttgaaaagtggggttccactgtcaaatgtggatgaaaccaagccaagaaggcttttctctccccacaggactctcagaggcaatgatggaacccatcctgactcccaacccttctcaccgcctctctcctccacccctaccaagggccacgcacagcccagggctcctgctcccctcaatgctctccctgcttttattgtggccatgttttacctcccattcatcctctacccagcagccagagtgatccttccaaaaagacccattaaaaatctagcacaacaggaaactccacagagacagaaagcagatgggtggttgtcaggggctgagtggctggggactgactgcttaatgagcatgaggtctcctttggggatgatgaaaatgtttggaatgagagagaagtaacggttgtacaacattgtgaatgtaccaaatgccaccgaactgtttactttagagtggtgacttttttgggttttgtttgtttgtttgggacggagtcttgctctgtccccaggctagagcacggtggtgggatctcagctcactgcaacctccgcctcccaggttaaagcgattctcttgcctcagcctcccgagtagctgggactacgggtgcccaccaccacacccagctaatttttgtatttttagtagagatggggcttcactatattggccaggatagtctcgatctcttgacctcgtgagctgcctgcctcggtctcccaaagtgctaggattacaggtgtgagccaccacgcccagctggggttttgtttttgagacagagtctagctgtgtcacccaggctggagtgcagtgacaccatctcggctcactgcagccgcgacctcctggactcaagtgatcctcccacttcagcctcctgagtagcagggactgcaggcacatgccaccatatctggctaagttttgtaatttttttgtagagagagggttttgccatgtttgcccaggctggtctcaaactcctgggatccatccagccatcatgaaactttttgtgtcataaaattttgtctcaatttaaaaaaaaaaaaatgtgccctgactaaaacatcttcagtggacacccaccttcctcaaagtaaaatcccatgtctatagtggcctaaacagtctcccccgtttctccccctattccagacacaatggcctcctctgagtcctcacacaggccaagtcggtgtccacctctctgacttcgcacatgtattctctctctctctggaacattctttcctccgacacctacaaggctgctccctcatttcattcaagtctttgctcaaatgttaccaacccaagactgtccctgccaaccgcatctaaaataccatctcctgccaccctttgctctgagagaggaaaacagtacactactagcctgatattttgttatacagttagtggcttttagtggtctgctttccccagcagaatctaaacagtgagggcagggactgtgttagaaatggccagcacccaaaatagagcctgacacacaactgctgttcaatagaaacaggttaaatgaatgaatgtccatgcagatgttccctaaggttcaaagttatttgtccagggatattttttccccaagggacatcttggcaggtgagcgttcaacaggttgactttgacaagtgcttgctgcattagtttcatatgactgctgtaacaatcacaaacctcttggcttcaacccacatgttttctcttacaatattctgaggtcagaagtccaaaaccaagtcaaaaatcaaggtgtcaggagggccacgccccccttggaggctctaggggaaaattgttccttgtctcttccagattctctggtagctgccagcattccttggcttgtggttgcatcaccctgatctttgtctccatggtcacatcaccttctcctctgtatgtgttggcaaaatctccctctctctctcagaggcacagttgtgattgcatttaggacccacccagataatccaaaataacctcctagtccccaaatccttaacttaaccacatctgcaaaatccgtcttgccatataaggtaagttcacagactctaaggataaggacctgaatatctgtaggagccagtctttagtccaccatactcgctaactgtgctgctgctcacttatgtcaatgtcgttgctgtgttttagggttttaggaaagggttcgggagactgtgctctagtcccaatgctacacaaccttggacaagaccaaccccttgtcaagcccccactatctcacctttataaggaagctgttgcttctatgagtccattcatatctaatatcctgagcctttatattgagttttttaaaaggctgaaaagcagctgggcatggtggctcacgcctgtaatcccagcactttgggaggcgggcagatcacaaggtcaacagattgagaccatcctggctaacatggtaaaacccagtctctactaaacatacaaaaattagctgggcatggtggcacacgcctgagtcccagctactcaggaggctgaagcaggagaatcgcttgaacccaggaggcagaggttgcagtgagccaagatcagcctggcaacagagtgagactccgtctcaaaaaaaaaaaaaaaaaaaaagctgaaaagcttgctgagggcttaaaacaagaatcaaaatcaggagctcccatggaaagaggggccaaaagcttccctcccaccacctgcaatcctacgaacagttgttatgcggggaaaaaatcaaatacctacaatcctgctatgagtatttcacgaaatttattcttaatacagttgacattagactctatgttcagctgaccccatttttttcactgaacactactacgtatttcatctactatgtatttcatctactactacgtatttcaatacgtgttattgaaacctctcattttaaatcctttgctggttagccactcccaagaaatcagacatggctcagcaccctctcaggagacagccatcaaggtccccttctggcataagaagcaaagatgtgggaacttccttaacccatggactaagtgatgggtacatcaaatcagcttgcaaataggggacaactctttgctgcttatccctcttcctcagcacagacctatggcagctgccatgaacctaaggaatacgaccaatggtccatgggttacagactgctaatcgctaacctaaggcaaagaccccaagatcagcagcttgcaggccccaggcactcagcaagccctggcagttagctgagcagctgtgccctgtgtggtacccacttacttagcagagagaaaacacctggtatctccctgaatgcacagctgggtcattcctgaaggatatgagctcagctgccagctgtcaggacctcacagtcacagtatcaacacaagagttaaaagaatacaggtcataaggccagagctccaggtcccttccactgcctacctctgtccttaggcgagccatgggaactctctggatatttctttttctttttcttttttttcttttttttgagacagagtcttgctctgtagcacaggctgtagtgcagcggcgcgatctcggctcactgcaacctccgcctcctggattcaagcaattctcctgcctcagactcccaagtagctgagaccacagacacgcgccaccacgcctgactaattttttgtatttttagtagagacagggtttcaccgtgttagccaggatagtctcgatctcctgacctcatgatccgcccgcctcggcctcccaaagtgctgggattacaggtgtgagccaccgcgcccggccactctctggatctttaaaacagtgatgctaaaaacctgcctcacgaggggattaacagaatttaataaaacagtaagtctttgtaaccaccattcaggcagagcaagaagatacagtttatcatcccgtcttttaacaaccttctcactgccttactctcccttcatttccatttctgtcatccgcaatatgatttccacccctcagcactcaactggatggcctccagatcgccacatgcaatctttccacgcggcctttaacaaaaagggctctggaaccagatggcctaggttcaagtcccagctgcacaacttcctgtgcctaggtttcctcacgcattgacaatgataataggaccctccttacagggctcttatggacgctgaatgtgccaagaagtgtaaattacacctggcacataggaaggtatattggtattccctgaaatctattttctaaactttgattagacaacataatatacacaaaaattgcataacacataaatgtgtagcataataaagtaaactccatgaagctttctgagtgtcccttcctgatctgaccattctttattccagaaggaactgctatcccaaattctccagaaatcactgggccctcgaactcctgggctcaagtgatcctgccaaagtgctgagattacaggcgtgagtcaccacggctggcctgtggcagtggaatttatagacaataaaattcatcctttgaaggtccagtttgatgacaaatgtgtaagtttctcagatcttggccgcagtggctcatgcctgtaatcccagcattttcggaggctgaggcgggcggatcacaaggtcaggagatcgagaccatcctggccaacatggtgaaaccctgtctcttccaaaaatacaaaaattagctgggcatggtggtgcatgcctgtaatcccagctactcgggaggctaaggcaggagagtcagaggttgcagtgagctgagatcatgccactgcactccagcctggtgacagagcgagactccatctcaaaaaaaaaaaaaaaaataaggttctcagatcttaacacctctgcccgtgtgctccatcccctacaaacagcacaaacctctttaacccagtcctttcccttcctttgcagaatgacgtgttctctgaagtcactgatccaccttcctgttcctcctcattcctcaacctggctgtgcccattgcgggtatgttccttggggctccatccctggtcctgctttctcccccacagcattctcttgccaggttcatctgctccctcagcagcgtctctgcagatcactcccaagtctgcgccaaggccccaacttgtctgataaagcacactcagtctgagaatcacaggccactgacacctcaaattcaggatatgcaaaggcaaattctgtttgccccaaccagtctctgccacatatatatatattttctatgttatagtccctagaagccaaaccaaaatcagacttttcaatttatcaaattccctacagtcaaccacttcccaaatcccctgtactcaactgccaagatctctccaagttttttctgtgcctccaaatgcctcccctcttctgtttgccaggggagggtgtcctcactcaaaataacttctaatgggccctacaggcaaaatccaagcacaagtccttcagggagcttccatgttgtggtaagccaatgaggaatctgtcacttgggcctgcataccccacagtggccttcttccaaggatggcactccattttcctgtggggagccacacttctccattctcaggtatggacagcactacccacccaacagacccaggcctaaggccatcacccagtcaattcagaaccagcacctggttctgacaagccactccatttcatggggcttcatcttatggaaaaggagctgtcttttgccaatggtctcagcgcagggaggataccagtctggagctgccagcttccaacgtgcagctcaagtgagaaagcgcacatcctgacatctttggatcctgtagccacagaacctacggatccacgagtggcgtccaaaacacgcccttcttggcttaagccatactgggctggttttctagcctttgcaatagaaagggtcccatccgaggctgcaatttccttccttccctcatcatctcaccatcccctcaccctgcagctatgccagacattttctaaatcaaaaacacaacaaataccccaaaaaacttttcaagccagctgccttatttaattcccaagcattcctctgatgtctctgtgcctttgcccacgccgatctctggcgctgggctgccttccctctctagtcttggggaatcctactcctctgtaaggcctcctcaccttcctctcccttctctgagcccccataacattctgaatacatttactacagttccctgcttaaactcggctcttccaacaagaccgcaagctcctatggcagtggtcagggcccactcacaacatctctgcattaacccagaaggtgactcaaaaaatacttgcttgactgaatgggaggaagatggcagagcagaagagagactccccggatggggttactcagtctctcggggctctgccaggtatagatcttacacacagccacattcccagggtgacgagaggaaccggggcacacagctcacctccaaaaaagcagggcgagcaggacacactggacacacaaatcaggtgaagcaggtgcagcagctcttgcagggcacaagcacaaagccctggcctccatgagatcccttccaggctgctgagtttttcacatttttacaaactcaggacctcagagccgtaataacccatgtgggctctgtgcttctatcggaatccgcaggcaggtatggcaggcacgacaggtacacactaggcaacctctgccctcgctctgggtcagggggtgggtggtaaaaaatgtacactgggggccaggcacggtggctcacccctgtaatcccagcactttgggaggccgaggcgggcagatcacctgaagtcaggagttcgagaccagcctggccaacatagcgaaaccccgtctctactaaaaatataaaaattagccacaggtggtggcaggcgactgtaatcccagctatttgggaggctgagacaggagaatcacttgaacccaggaggcagaggtcgcaatgagccaagatcgtgccactgcactccagcccgggtgacagagcaagactccatctcaaaaaaaaaaaaaaaagtgtacattgggactcgcctccttgtgcccaagagaccctggggtgtccccaaacttctgtgccactccatgcccccattcaccttatgccacccttttcttctctccaggagactcttgggcacccagagcacatggaataaagagtgagctggagccgcgggctacaaggggtagggacagctgtggggacctccctctaggactagcctggccaggagagcaggaggtggcttccccagctgctgccaaaagacacctccagccacaactctccactcaccccatgcagccagggctgcccactgctgtcttccacgctgtcctgtagtggctgcttttgcccagatctctccatccaccacaaaatgaacctaacgaggatgcagggtgatgaggtgatgaggtggttcaggctccaagcaagaaagaagcctttgtttgccaaaggtgggtcagaccttcttgtcccagtggccgagacagcagaggaagagtgtaaagtgggattatatgctacaataggtatgacaggagctacaaggattggctcagagccatgggaagtgggcatatccctagccaggcactctccttcagaacacagataaaacaggtggccgggcgcggtggctgatgcctgtaatcccagcactttgggaggctgagatgggcggatcacgaggtcaggagatccagaccatcctggctaacacggtgaagccctgtctctactaaaaatacaaaaaattagccgggtgtggtggcgggcacctgtagtcccagctacttgggaggctgaggcagaatggcgtgaacccggtaggcggagcttgcagtgagccaagatcgtgccactgcactccagcctggatgacagagcgagactccatctcaaaaaaagaaaataaaaaaagaatgcagataacacaggttagatgaagggcagagttgtggccatgggcatggaggtgagagatgggtaccgaatgtcagctctccattagctagtagcaggactttctctaagccctgtctccttatgcttgtgaaataggcctgctggatttaataatctatctcagaggccccttccagtaataagcctgtgagtcatcagaaaatgcatggagaggtggagacacacccatccaaaccctccctctgcccacccatttaccaaacagcgcctgttccaccagcccactgctaagcttagggtgcattcctggggagccctccccaaaacaggttccacatggccctgtgaggcttctaccacagacgccgaaagaggcagatctgcctgcagcagggtacaaccagagcaggcagggactttgcaaatctttctggccggtgaaaagtttaaacaccgtcatgctgttaagtgatccgagagcagcatctttccaccgccctggagtggttctggcagggcaccctgcactgggggtgccgaaagtgaagaatgaattacattgcttaatttctcctccaatgtacttttttttggacggcgggggagtggagacattccacacaataggaaagagacccatcctgggcaaggcatagccagatataacaatgcaaatgtgtgtacatatacaactcttcattttgaaagggaagctgaatctctgtgacttttgcaagattagtcaccctgggtgcagcacctaagtgtcccagtccttaggtgccctctgccctggccttctccccaaggtataccctctcaccaacctaatatattcaaaacctaagagtgtaattcgttacctttcttccaaattcacttaagacttaagactgtgtcaatctctaaaagcatataacagggacagtggacagtggaaggccagaacactcttctgtcctaatgggttcaagaaatattcttagcttcttagaccagttcccttagcacctacatagaagatcaggaatggaaagagacaagaaaagaggaggttgagatccatctattatcctccttattaggagtttaaaggctccgaaagaggaaatgaaaactttgggttaaaagaagactcagtggaattattcggatttaaaatataattgaactgaacaattgatacacggctctttacatccttgactttttgtggttgatttcattatatttctagctcaacctgcaaccttatctcctatttagcacagatgatcaaaaacatgttgccggacactcaaagaaatgatctgtatctgttcatcttgatttcctcagcatctttttctccctttgtgtggattcaggcacatggactcacacaaagttcagcacagaatgccacttcccagaggtctcctctctgccctctattccttcaggtctctacaacttctctaacactaaccatcctgcttccatctctgcctgagagctagaccggatctctcaaatcccatccaggtgagagcaaggattccatcactaccatatcttaccagttaccattgtgggtagacatccattctcctccctcaggtatcagctgacttgcatttgctcccttctcagcccaggtggtgaggatggggctgatccacctcccaacccccccatccaggctccatctgaaagctgctaggtgactttcctggtttttttcccctctttggaattacgaagtttttagaatcagaaagactctaaagtctttagaatcagaaagtttttagagtcagaaagattctaaaaacttcataattccaaagcgggataaaaagggttttctgagaagattgctaagctagaaaatgaagctaaaacagagggatgcaaagcctagagatggagatttctgatgacactgcctttgcttcttctattggttatttactgggtgtaacaaatttgcccaaaaattagcgacttaaaacaacagtcatttggccacgtgcagtggctcatgcctgtaatcccagctactcggaaggctgaggcaggaggatcacttgagcccaggaggtccagaccagtctaagcaacatagcaagaccccatctcaaaaacaaaaaaaaccaaatatggtcacttatggattcagtttctggggagcaggtatccacgcatggttttcccagaccccgagccttacccagggtctctcccaaggctacaatcaagatgtcagccagggctgtagtcaccataagtctcaatcagaggagaatctgcttccaaactcattcatgttgaggctgttgaggcatttgttagtttcttgccacatgcgtctctccctaggacagccaaccagcaagcaggcaagagaaaacaagcatggcggaagccacggccattttgttacctgctctcaggagtgacattctgtcatatctattgttagaagcaagttactgtgtcccgcccacactcaaggggaagggattacacaagagtgaccaggaggcagggagcacagaaagccatcttagaggccacctaacacatctctagaacaggcggtacctacagccacacgcctgtgggcttttcattcatgagggccaataaatccctgcaccccacactctgtgactgtcgctcagctggtttgacttgggctgctaccacttaaaacccagggtccctcggactttaccacaactccttgttacagtcatggctgactcttccaggcactccctctcattggttaaagagaagcattagcccctgacttctatcactgttcccaccatgcgttttggcaaagggatgccaggacccatctaagttggcttctcagtttttcacgctctttgtgcttctgccctggttcttggccaggctgcctggtacatggggccctgccctctgcctgtcttctatgaaattttctaaggggtctgggaccagcagagactggcagaaccatctaagcaactccctccccaaatagtgcccatgcataaggtaatccagacaccccaaggagctctgaacagtgggcctatagggtcattgtttagctcagagattgtggtattatattaatacattttttttcaaggaagaaaacaaaccagatctaagctgaatgagttttgaaaacgcactgaaagaaatctgattgatctagaaggaagaaaagaaagagtgcccgtaaaaaaaaaaaaaaaaaaaaaaaaaagaatcttccccattgttgaccactgagattcagccttctaattcagaggggagcacaaggtgacccctgaattatgctacaccaattcagctgaaattaagggtaatttgtacaaagagtctggaattttcaaggagaactaattcctactgtcccagccatgaaaatcagagtttccagcatagtagtctaatctcttagtcggctagctgactaagtatttctttggtgggactacgcaaggttgggcagctagaatggcctccgcatgctgattttgagtgacccacattgcttacatagacaagtgcccacacgttctaggggcagccctgcctccacaccaccttggctacctattccagtggtcatcccctgacctggtattttaaatccagacttctcaagcctggatgagcatctgaattaccagaggagattttttaaagtagggtacccaggacacactctataccaattaattcacaacctccatcaaaatcaaaatacccaggccctgttttttttttttggtttggtttccgggtctttatgttccccagataattccaacattgacaagacccattttaaacggagagccacaaatcccaaacaggcactcaactcttgcttactctgccccaaatgaatgttcaataggcgagtaattaggcatatcctggacacattttaggaaactgtctcttcctaaacttcccattgaggaagggctgtggaatctcgatcctcagagtgggatccagggaggcaccagcagcattcctgtcgcctagaagcttgttagaaatgcagaatctgcattttaacaaaccctgaccggacgtagtggctcacacctgtaatcccagcattttgggaggccgaggtgggcagattgctaagagcccaggagtttgagaccagcctgggcaatatggcaaaacccctcctctaaaaaaattagccaggcgtggtggtgcacacttgtggtcctagctactcaggaggctaaggtgggagaatcacctgagcctggggagtagaggctgcagtgagagctgtgactgtaacactgtactccatccagtctgggtgataggttaagaccctgtctcaaacaaaccaaccaaccaacccccatgtagttggtttgcacatttaaatttgagaagcacagctcatgccatctagcgaccctactctagctgcccagtgagactgttttccattttccaaaacaacgatttcatttctcagatgatgggaaatgttttctctcacacttcacttagaaagataggaacaacccggccaggcgcgatggctcccacctgtaatcccagcactttgggaggccgaggtgggcggatcacctgaggtcaggagttcaagaccagcctggccaacatggagaaaccccgtctctaccaaaaatacaaaaattagctgggtgtggtggcacatgcctgtaatcccggctactagggaggctgaggcaggagaactgcttgaacctgggaggcagaggttgcagtgagccaagatctcaccattgcactccagcctgggtgacacagcaagactgcatctcaaaaaatctcaaaaaaaaaaaaaaagaagcaaacccatagaacccatagtagctgctcatcaacccacagcccaaattcatcctatcctacccacatcagagcccacgctcgcagccttccctcccacaacagtaactcctcctaccaaaggcaacttacctgctttctaccgatcagcacataatacctacctttaaatttaaaaaattaaagataaatatatcctttgaccccagttctccattcctttattcatttccttctcctaacagaaaaaattttcaccaaaaatgttgcctgtagtcacggcttcgaatcttttacctctaattccctccttcccactccactgagcctactctccacaatgtcaccagtgacctccatgttgtcaccaaatccaagggcatctgtctctcttctagagtcgttggccagccagcaacattcaatgtcccctttttccagaaaccatgactgctctgggctcccatgacatctcatgggttttctcaagtagtcacctttttggatcatcctctgtgtgttcttaaatgtcacagtgcccagagctcactcctgccccacctcttttctatctactcactccctgtagtggcctgaccctgttccatagcttcagacattctctattcccaatgactctaaattaatatctctagccctgacctgtcccagctctccagacccatggccacctggctacctatcatccctatgctgatgctcaggaggaatctaacgaatctaatgactcattttcttcacttccaaaaacaaaactagacctgctctccataactcattttaataaatggtaccaccatctatcatcctgttgcttacaccccaaaatctaggattctcaagtccacacaccttccacatccaattcctctcacctatcagttctatctctaaaacatcctgatccatccacattttccttctccactgctgccatgctgttccctacattattacgatgatcttcttgttccacttttcatcccctccaattcattctcacattgcagccagagggaacttataaaacatccatcaaattatgtcagccttgtaactaaaatcatcccaaggctttgcactactcctagaaaaaccaacccaaaccatttaccctaattcataaagcaataaagcctgcctctgactacctcaccttacactgttttctgctcttcccctccagccaccctgaccttctagctctgtgctgtccaatgcaggagactctggccacatacggctatttaaagttaaaattaaattaattgaaactcaaatagaatgcaaacatgccatgcgtattcctacccgacgccgttggtaaggcgtctccctctgcttggagcacctgccctgcttttagggggaagccacaccttctcttgccttccaggtgtggtgtggctcaggtggtggctcctccacaaacaccggcccctcctctgatcttctccagcacctgcctgcagcccagctttgactcttattcaaactcaaataaaattcagttccttggtctcactagccattttgcaagtgctcagcggtcccatgtgactagtggctaccatgttagatggtacaggcctagagcatccctgtccctgcagaaatttctattggactgtgctgttctagcattcccaggatgaggcaggtctgatcttgcatgacacttttgcacttgctgtcacctctgcctggaatgctgttccccttcccctccctgtggccagctgcttcttgtcatccagacaacagtttaagcgtcaccgctccagagaggccttccctaagctcccaatccaaagaagccacccacttcctcccaatcgcatgagcccgtgtaactgcagagcacgtatcactagctcatgcctttcttgtttgcgtctgtcagcttattccccaactctaccccacctctccaccccaaagtatactcgtgagatcagggacctgggtagtcttactcaccactgcattccagctcctcctcctgcatctgcccgatgactctgctcagtaagtgttagtggactgccagaccttgccatgttcgtatttcctctcgagtctctcacaaccatcaccttctcatcattatccctgccaccacccaggcggggcctttatcctctcctcctgggcagtactataaacagaatcctacctctgccctccagtcaaccctgcaaacattagcacgttactcctactaacattcctcttgtcatatcaactcccggttcctccatcttctggtcccaaatagcctccacatccccaaaagtgccatgcgtattcctacctcggtgctgctggtaaggcctctccctctgcttggagcacctgccctgcttctcagggaaggccacaccttctcttaccttccaggtgtggctcgggtggcggctcctccgcagacaccggcccctcctctgatcttctccagcacctgtctgcagcccagctttggctcttactcaagaagtctcacatcccatgtgcaggcacacagataatccccaagaccatgtctaaaattcaacagtctcaaactttgctgaggatcagaatcaccgggagagctaatgaagaacacacaggtccaggctcacggaagcaggatagagtctgaatctctgtactttttccaccttccttaggagatttgagatttgcatctttagagcattagaccttcaacatgaatagctcaacctctcttcatcctcgctcccacccacacacccttcccagcctctagttaaagatcacttaaccaattccagcaactcagaactcctggggagtgaccgacttggcgaataacgtcctctcacacaaacctgctcttcttcaattattaaaagatacccgctgtggtaggcttgaaagtgcccccccccccaaatatattaatatcttaatcaccagaacctgtgaatgttaccttatatggcaaaagggactttgtagggcatgactgacttaaggattttgaggtgggggagttattctggattatctgggtaggttctaaatgcaatcacagggtctaagaggaagacaaggtcaaagaagaaagaggctgatgccacagtcccactggactgtggtaaggtggttccttacaccaaggtggaaacaggcgccaaggaaggagttcaagaggatgaaaacaggaaggaacagattctccttggagcttccagaaggaccagccctgccgacaccttaatttttagccttgtaaaactcatttcagactttggatccttagaactatgagtaaataaatgcattttaagtcactgcatttgtggcattcgttacagcagcaatgggaaactaacacacttcctcttacataacactacaaggtgaagttctactttgtctgtcttgctgggcctccattaacctttataggaacggccccaggttcaagaggccaaagacgagacacagagccagccaatgagacacagggttttatcagctggaaacttacatacagagtggtccagtggtggcaggctgggaaggagaagtagcttatatacagtccagtggtggcgggctgggcaggagaactgccttacacacagtccagtggtggcgggctgggcaggagaactaccttacacatagtccagtggcaggctgagcaggggaaccaccttacacacagtccagtggtggtgagctggttagggaaaccgccttacacacagtccagtggggggctgggcaggagaaccgccttacacagtccagtggtggtgggctgggcaggagaactaccttacacacagtccagtggtggcaggctgagcaggggaaccaccttacacacagtccactggtggtgagctggttagggaaaccgccttacacacagtccagtgaggggctgggcaggagaaccgccttacacacagtccagtaggggactgggtaggagaaccaccttacacacagtccagtaggggactgggcaggggaactgccttacacagtccagtggtggtgggctggttagggaaaccgccttacacacagtccagtgggagctgggcaggagaaccaccttacacacagtcccagtgggggactgggcaagagaatcactttaccacagtccagtggagggcttggcaggggaaccaccttaccatagtccagagggggtctgggcaagagaatcactgtaccacagtccagtggcgggctgggctggagaaccacatggcccagcgtggccagctaggcaggagaactgcaagcacttgcctgaagcatgcagtttatagagcatttttgctttgcatcctctccctaacaacctccacctggcaaccttcatttaacccaaaagaaagggccttggtcctccatatggcctgtgttccactggacgggccaagggctcagatgtttctcataggtaaggaatgaatctctgagttggccactgcctgattctttagcatggaaatccacacacacattctggtgcatctaccacacagggtcgttctcagggtatgcttaacttattgctgtcaagtgtgtctaccatgcactgtgattttctatttaatgcatgccccagtgagcattttctttgagcatcatatagtcctgaaaaagtttcagattttggaggatctgtctttgtatttagctcagatatttaaaaattgcactgcagagtaaccagatagcatgacgttcatataaaaacaggcacgtagaccaatggaacagaatagagaatccagaaataaatccatgtatttacagccaactgagtttcaacaaaagcaccaagaatacacattgaggaaaggacagtctcttcaatcaggggtgttgaggaaactggatatccatacgtagaggaataaaactggacccctatctctcaccatatacaaaaatcaactcaagatggattaaagacttaaactaaggctcgaaactataaaactactagaaagaacacttcaggacattggtctaggcaaagattttacagttaagacctcaaaagcacagacaacaaaaccaaaaatagacaaatgggcccatattaaactaaaaaggttttacaaagcaaaggaaacagtcaacaaagtggaaagacaatctattgaatgggagagaatatttgaaaactatttatctgatgagggactaatagccagaatatacaaggaactcaacagcaaaaaaaatttaaaaaaataaaaataaataaaaataaaataaccattaaaaagtaggcaaagggcatgaatagacattctcaacagaagacatacaaattgctaacaggcatataaaaaaatacccaacatcactaatcaccagggaaattcaaattaaaaccacaacgagctatcatcttacgccagagttagaacgggtatgcctggcttatttaacttaaggtaacataataacctccagttccattcatgttgctgctaatgacagccgttagaacagctatcattaaaaagataaaaaatatcattaaaaagataaaaaataacagatactgccaaggatgaggaaagatgggatctcttgtacactactggtgggaatgcaaattggtacagccactggggaaaccagtacagagacttctcagaaaactaaaaatagaacaaccataccatccagcaatcccactgctgggtatttatccaaacaaaaagaaatcaggatatcaaaagacatcaggccaggagcagtggctcacgcctgtaattccaacactttgggaggccaaggcaggtggatcacctgagatcaggagttcaagaccagcctggccaacatagcaaaactccgtctctacttaaaaatacaaaaacagggccaggcgcggtggtacacgcctgtaatcccagcactttgggaggcagaggcgggtggatcatgaggtcaggagtttgagaccagcctggccaacgtggtaaaaccccctctgtactaaaaatacaaaaatcagctgggcgtggtggtgggcgcctgtaatcccagctattcgggaggatgaggcaggagaatcacttgaacccgggaggtggaggttgcagtgagccgagattgtgccattgcacttcagcctgggcgacacagcaaggctccgtctcaaaaaaaaaaaaaaaaaaaagatatcaaagagatacctgtactcacacgtttactgcagcatgattcacaatagcaaaattatggaatcaacctaagtgtccatcaatggacaagtggataaaaaaatgcggtatatatacaccgtggaattctattcagcatgaaaaagaaagaaatcatgtcattagcagcaacatgaacggaactggaggttattatgttaagttaaataagccaggcatagaaagacaaagatcagtgttctcactgatatgtaggagctaaaaaagttgctctcgtggagatgagagtagatagttaactagaggctaggaagggtgtgtgggaaagaggggggatgaagagagtttggttaaggggtacaaacatacagttagacagaagatataagttcttttctttttttttaagacggagtctcgctgtgacacccaggctgaagtgcaatggcgcaatcttggctcacggcaacctccgtctcccgggttcaaccaattctcctgtctaagcctcagcctcccaagtagttgggactacaggtgcatgtcaccacgtctggctgatttttgtatttttagtagagacggtgtttcaccatattggtcaggctggtctcgaactcctgacctcaagtgatctgcccgcctcagcctcccaaagtgctgggattacaggcatgagccactgcgcccagccagaagatacaagttctaaagttggatagcagagcagagggattatagttagcaacaatatatcacacattttgaaacagctagaagaatgtttgttcccaacacacagcaatgactgacgctaaggttatggataccccaaataccctgacttatcaattattatacattctatacatgcaaccaaatatcacatctaccccataaatatgtaaaacattacgcgtcgattaaaaagtaaaataacacaagatgctctatttagacagggctagtttgctttggtgtccacaacttgtaggtcagtaactgctgtgtacatctatggatatcaaaagtccttaagggggccgggtgtcttggctggcacctgtaatcctagcagtttgggaggctgagatgggaggatcctttgaggtcaggagttcgagaccagcctggtcaacatggtgaaaccccgtctctactaaaaatacagaaatggccaggcgcaatggctcacgcctgtaatcccacaactttgggaggccgaggtgggcggatgatgggtaaggagattgagacaatgttggataacacagtgaaaccccgtctctattaaaaatacaaaataatagccaggcgtggtgtcgtgcacctgtagtctcagctacttgggaggctgaggcaggagaatggcatgaacccgggaggcggacgttgcagtgagccaagactgtgccactgcactccagcctgggtgacagagtgagactctgtctcaaaaaaacaaacaaacaaacaaacaaaaaaccagaaatatacttgggaggctgaggcaggagaatcgcttgaacccaggaggcagagggtacagtgagccgagatcacgccactgcactccagcctggagacagggcaagactccgtctctaaataaataaataagtctttaagggaggcctatattccaagggaattgcgaccctccttggtgggtctggcagcctaaccccaattgtgtttccaataggcgaaattcgggagttccaaaattggaccaggtcatggggcctggataccctgatgaagaactgctgccgtgtttcgacttgaggaaacctagaccagatacactctgcttcttagactcttattttcatgctaaaagcatacagtttagacctgtgctctcccatatggtagtcagtggacacatacagcccctcaatataaattaatccaaatgaaagaaccacttccgcagttgcaccagccacatgttagtggctaccgtactgggcgtcacaaaagtagaacattgccatcctcagagagttctactgggctgtgctgcctgagggcatctctccaggcattctttgctacagcttcacctccagctccctgacttagaaaagcctgggagcagagaaatgctgtcactgcatccaattccaccgtggatgcatcctcgagcacgtgaccgaagacacacagcgagggatgctttccaggggtgtttgcccacgtgtggggcttttcactgaaaagactctatctttggaaagggagaggcagaagacacagaacactggaaaacaagaggaagactcaggcaggagcaaggtagggcagatggagatgagagagaggagggaagtaggaaaagataataggagtagcatgtagaaaatggagtctagccgggcgcggtgtctcacgcctgtaatcccagcactttcagaggctgaggtgggtggatcacctgaggtgaggagttcgagaccagcctgaccaacatggagaaaccccaactctactaaaaatacaaaattagccgggcatggtggcacatgcctgtaatcccagctactcaggaggctgaattcagcaggagaattgcttgaacctgggaggcagaggttgtggtgagctgagatcataccagtgcactccagcctgggccatgagagtgaaactgcatctcaaaaacaaacaaagaaaagaaaaaagaaagaaagaaagagagaaagagaaagaaagaaaagaaaagagagagaaaaggaagaaagagggaaggaaggaaagaaagaaaagaaaagaaaaaaagaaaaagaaaagagaaaagagagtccagtagtgtcatcacaagtagaaaattcaagtgttgcaaaggattctttcccttaagatctatatgtaaaacaaccgactggcctgcagagaggctagaccaagtccacccaacgatctgcaagacagagggtcctctgagggtccactccctatggcccagggaagcagagagggaccccatccactcactgcctgcatgggaggctgcaatagagtgggggagccatgggagagaaattcaacagaaagtaaagacaaacttttccaagcagaaattaaaaaaaaatctgaaagtgcacgatgctggcaaggctatgggaaagcaggcactcctactcgctgctagcagaagtgtaagctagaacagtcttgttagaggcaatctggccctttctgtcaaaactacaaacacatatattctttgttccaacctttcaacctcagaaacttgcccttcagagaccctcacccacgtgcagaatgatggatatacgaggctatccacagcagcaacaggtaaaggtaacagagaaagattagaagcaacctttatgcccattggtgaaatgagtggggcaggcattaaacaggaggaggaagctcttcctattgactaaactccaagatatgttatatgatttaacaaaaagcatcagtagcaccagcaaggtgcagaagtatagaggggatacctgtgttcagaaaaccacagagatcgcatttttccgccccctacaacttgtgcctctcacttcccgacacacggtttcctgggttaaggaaaataaaatgaaacatatttggaaattcctggactacttctggaagtacccacaagaaactgatcacttgtttgccactcgggaagggaactgataggttgaggacagggatgggaaggagaccaacttttcactctacgttttttgtacctttcagatatcagacctgagcatatattacctatttgataagtataaaattaacagatatacttttgggtatacatactgaccaaacatacttctgtctcttttgtttctcaagatagggtcttgctatcttgcccaggctggagtgcagtggtgtgatcacagctcactgcagcctcaacctcccgggctcaagtgatcttcctgcctcagcctcccgagtagctggggctacaggcatgcaccaccacgcctggctaatctttttttttctttcattattttttgtagagatgggggtctccctatgttgcgcaggctgatctcaaactcctgggctcaagaaatcctcctgcctcagcctcttaaagtgctgagattacaggcatgagccaccatgcacttttccgtcaatgctacagtctcactgggaaggaagccagtgcctgccaggtgagtgggcccaggttaccagagcacacagccctgtgctcccaagatgcaacaggcccctcgttgtgccctgccctgcaatctggttcttcagaagaggagttcccaaatacctggtcctctgcaaatctgagctgtaaacaagccttggaaaggtcctccccttacctaaatcccagcttcagggtcccgtttctgactggggtgccaccaccaaaggcagggtatacacagccaccgagtgatcctctgcctgcttctcactccagggaagaaaatcaaagcaggtcccatggctgccgtctgataatcactatggacaccacacaccagccagcatcagggctgtgtccaattagccacccccataacaacaccatagcaacaaaggtaatattattgttctaaagagaagagaaaaaccacacacacacacacacacacacacacacacacacactgtgttgtgtgacagctttgaaagccacagagatcgcatttttccacaccctagaacttgtgcctctcacttcccgacacacagtttcctcaatgagaagtcacaggcttggggcaatctcctcttcacgccattccaagatgcgtgtccttcacaggaaactggcatgagaatgattctctggcaagccaggagtcagggctgcctcctcgctctgcctctgtggctggcagggctgggccagctgcagaccaacaggctgggggtcatgctccaagctgtcctctgtctgtctgtctgtctggctggctggctggctgcctctctgtgccagacccaagctggcactggggttttggtggttgcatcaatgagccacacgctaatctccagacctaaatgtggaaagcattaacccaaatgaaaagacataaattaggacgggggcttatgggatggaggaaaacagctcttctctgagcgagagcctgggctgttgcacaagagctgagtgagtcaccagccagcagagggaaggaccagggacggaaggagggaggggagccccccgtgggactggcgggtgcacaggcggggggaacgctgcaaaaacacagctgtaggttcataactaagcacacttcatcagcagtctgaaggagggtggggggcaaagtgtcacctcctccccaactcaggaagtgttgcaacacgtgtcctccccagagaagacagcagaaagaagtgttcctaactgttcaccctttacaggctgcagctgtgccccggggaagcacacctcagcacagagaaggcctctctcatccctccttgccccttcttggcagtgtccatacacttgggggtcccctagcatgaggtgtccattgtgggcacacaactcttgcccatacttattaccatttcttgtcttttcttcctttcctttttccaaactccccatcctccatactactgttgttaacaacaagacaaatcctttggtctcccccgcccctagtccctggggagaaccttataccttcccttaaaaccgtgccccactcaccaacctccccagccatgacagattccaaagctccaatatccaggcaaattcttagtaccttctacgagtgaggcacgctgtccctgggggtggcagtggagagaaggagctctcccaaacagatcatccaaccaggacttctgagacttagaagccctagaaatttgctcagcaccttggtgggacccctcacctctccagatcatcatcaaaatgaggttgggttggccggccatggtggctcacgactgtaatcccagcactttgggaagacaagggaagtgaatcatttgaagtcaggagttcaagaccagcctggccaacatggccaaaccccatctctactaaaagtacaaaaattagccgagtgtggtggcgtgtgcctgtggtcccagctactcaggaggctgaggcaggagaagaattgcttgaacccaggaggcggaggttgcagtgagctgagattgtaccactgcactccagcctaggggacagagtgagactcttgcctcaaaaaaaaaaaaatgttgggtttagagatcagctgggtcccttagactctgacagtgctcatctgtaagaaatgcatggaacaaaatgaatactctccagagtacctggctgctgcagggcttaccccggggaatgcaagctgaagaagagtgccctgggctgagcgggtctctgcaactggccgggctgctcacagccactgggtgctcaggaaaggtgaccagcagatagcaccagccgcatcctgccagggaagtcacttacaggagagctcttgcgggtagggagtgggtctgaagtggacttagagggcagctggcagagacaatgggaagagaaggtattccagaccaaggaatcattcattcatattcattcatttatttattcgacacaggtttcttgaacacctcttatacaccagacgcaggtttcgacactgggatacatcagttaacaagacaaagatccatgcctcagggagcttacattctagcaggggagatacacaacccacaacaagccagacagacaggtcaatgatccagttttgctggaaggtgataaatgatgagggggggaaaagaaaaaacagagcaaaggggtggacctgccagagtgagtgagagactgaaaggagataaagaggtctattcatatcctgaggctgctgtaacaaattcccatacactaacgggcttcaaacaatgaaaatttattatcttacagttctggaggtcaaaagtctgaaacaggtttcacagggctaaagtcaagatgtctgcagggctggctggttcctcctggaggctctaggagagaatccatttctttgcctttctcagcttctggagcccacccactttccctggctttcggccccttcctctcgtcactcagcctcttgcttccaacatcacatctcctaacactgattctggccctcctgcctccctctcataaggacccttggcttacactgggcccacgtggataatccaggattatctccccatctccggttctcaacttaatcacaactgcaaaatcccatctgccacagaaggtaacatattcacaggctccagagattagaaggtagacatcttcaggggaccattactcagcccccacagggagttgggctgcaaaggccctgatgaggaagcatgcctggaacatttaaagaaacaccacggaaggcggaggacagaggcaggagtgacacaggagtgagaccaacggggaggagcaggtgctgaggtcaggacagcaatggggacccaattatgtagcacctcatcagccactgtagggcttccgcgtcttcactctgccgacatggggcaccactggactgtggtaagcagaagcacgatgtgttcagacccttcctgtgaaaacaacagactagggaccagcagagcagccaggaggcgcctgcaacagcccggcagcattgtggtggcagctgtggctcagtccaaggctacagtggtagggtggtgagaagtgatcctgtgtttaaagatctgttttgcaagaagggccaacctgcattctcaacatgctgaatgtggaatgtgagaaaaaaaggggagtcaaggtttttgcctccagcggctggaaggacaaactagccatttactgagctgtgagaagccactgtagcccagacctgggctaggcaactgcgtcctggacaggacaagtggagatgtcaaggacacagctggacctacttgggtctgcacttttccccgagggtaacaggcagcaccaggaccctgttgctctccagggcgtggagacagccaagaccatcccggattacatttctaagtcagtcactcgttgcaagacaagatgatagagatggagtaaacagggatatcgcctgagccctcggtttctcagccaggtatttttccgcttctcacagcgcataaggtgggaaggaagtcatgggagcacagctggattctggaatgcagcccaaccacaggctcaaaatcctcatctgtgaacagctccactcactacctggtcagcctctccggcctgccctgggggccctcactgccctgccagtcaattccaaaaagccctcgtgggctgggcgcagtggctcacgcctgtaatcccaacactttgggaggccaaggctggtggatcccttgaggtccggagtttgaggccagcctggccaacacggtaaaaccccgtctctactaaaaatacaaaaattagccaggtgtgatggaggtagtcccagctaccctgggggctgaggcaggagaatcatttgaacccaggaggcggaggttacagtgagctgagattgcgccattgcactccagcctgggggacagagtgagactctgtctccaaaaaaaaaaaaaaaaaaaaaagcccttgtgtatctctgggctgtcttaacttatcaggggggtggtcctacccccggggcccagttaaccatgaggaccaagcaggcccagcgcaggtggccagcctgtgcagcacctcccagaggaggcaagtgttcccctcccactggacaccagcacaacgtacacatgccacatggtgacatgcactgtaagaggattcttacatctgtccccagggacagatggcactgctgagtgccttccgggcactttcagccattcattcatttgacaaatacttatggagcatataccatgcaccaggcgctgtttctaagtatctgggggcacatcaatgaaaaaagcagaagggaaataaacccttgctttcctggagtgacggctccagcatgaggtgggaatgggttgcggggagcagacactaaacacaataaaaaagtgaattctaaagaatgtcagaaggtgatcgggggaatagaacatggtaaagggaatcaggagttcagggtagactggagtgtgggtggcaattttagagagttcaagatgttacccttgctaaagatctttctagctcttctgctcactgtattgatttattccttcattaagtagttactgagtgctcaccgtgggcctggcccaggccctcagtgctctcatgaagctgacattttatttaaggagacagaggttaagacaactaattatagaaaggttagaaaagagcatgtctcaggggattcctacgaccatgccaatcatgacgaaacatgctaaacaagctgggggatgctcccaagagtgtccttgattcttgtttaaggtccaaggcccacttctctcctccttcctctcccaacacaccacaccctgagttagttagaactgctgtcttctcatctacaggaaatcacaactcagtggtttctctagaagctgcccactgtccttagaacttgcctggtgccaccccaaagcacctgctggtgttaggcctcctcagctaacttgacattccatgcttcagacccagcatatcttctttagaagcaccaagttcaacgagtgggtccttcaggctgtcttctcctggcagtgctgatccaagcacctgctgggcgagtttggttccttttgcctgactattctcacgcccagagccaggcagcctggggacagaggaagagcagaagaggatgtcacacccaggcacaccaggaggccaaacctgtttggcagctcaagcctctgaccacaagctggcactcgctttcggaagtgctaaccacaggcaggactgctagtgagcagagcaccaagggttttcctgctgggaagaaatgcaaggctggccttcatgcctgtccccctgcccccgccccgtgacaatccccccccagctctggacccgcccatctcttcccactccatatccagctggaagtgctggtccaggccccagtagaagacacagctaccaacagaaggtacggccaccaggagccaggccagccaccggccacctccctccattcttgcagaaatgcttccgctctcatcttcctcaaaagttgggaggatttgagagcagccagagtgttagctgtggaggatggggggccactgcctttcctcctggttcctctgctgagtctcccacaaatggttccacgagaccaggacggactcaatcctaagagtacgagtagaaggtctgttctcaaaagcacagtgaagggaggccaaggcgggtggatcacctgaggtcaggagttcgagaccagcctggccaacatggcgaaaaccccgtctctactaaaaataccaaaactagctgggtgtggtggcaggtgcctgtaatcccagctactcggggtgctgaggcagtagaatcgcttgaacctgggaggcggaggttgcagtgagccaagatcgcgtcattgcactccagcctgggggacaagagtgagactttgtctcaaaaacaaaacaacaacaacaacaaaaaagcacagcgaagattctcaggagggctgctcaggagcctgcaccctccaacagcttcccacgtgggcagccgggggagaggaaagggcaggctgctagggggagggagggtggagaacggcagctacggcagctgcccccacccctcctctcatcctttctcaccatttccttccttcacaactgccacatgaaagcaaaggcccactggaaccccaaggtgggcacgcagatgagtttcggatggcaggagtggcagagctgcaggagctgcaacggtcctccatctcctctctacgggctggggtgcagaagattggaatgtatacagccgccagtggttaagagcttgggctctaggccaggaactgtggctctcgcctgtaatcccagcactttgcgaggccgaggagggtggatcacctgaggtcgggagtttgagaccagcctggccaacatggtgaaaccccgtctctactaaaaatacaaaaattagccggacgtggtggcatgcacctgtagtcccagcgacttgggaggctgaggcaggagaatcgcttgaacccgggaggcagagattgcagtgagccaagactgggccactgcactccagcctgggcaacagagcaagactctgcctcaaaaaacaaataaaaaatttaaaaatttaaaaaaagaacttgggctctggagagagatggcctggttctgctactcactggctgggtgatgctggggaaattattaaactgctctgtgcctcagtttccccatgtgtcaaacaggcataagaatactacttacaggtctattgtgaggattaaatgagtgaatgaaggtccagtgcttaggccagtgtctggaaaatcatattatgtaaatgctgtctattattattaaatgctcctgaatcgacagatctgtttttaaaaattctctccacccacgaaacgatttgttcacctgtgggttgaggagataagtaaaagcatggggtattgaagatgcaacctcagaccaccaagcatgcttccctgtaccccgtcaacctctcccttgggcttccccagccccaagcctcccaaaaaagtctcacaagctcagaagatgcctgggtgccaccagtaccccagcatggaatgcaccccctcccacagtcatctcagaaaccactgagaccagttctcatgggggactttggaaggtagtgggcccaggctacctggaacctccaaaaacacgtgcctcgcctccaacaaaggcactgaggcacaatccgaaggccagccatacaacttccacactcaaacggcacacaccaaggcccaaaatagcatcagcaccatcatcaacgagatgtaaacagagggaggacacgactcactcctcctcgtacagtgtgacctgcatctcccgggagcacacttttatctgtgcacaccggtggtacccacccaggagatgatgcttctgaaactcctaaggccccaaaaccagccagcccctgtgttttcattcatccttccctcccactgaggggttgcaaacagagctctgtctttagccagcatcttctagaaaccctcatccttcctctccctcccagacacgtgcacactgagatcgagacccagacagcctccgttctaggcactttcccagtcagtttatgtgatggccctattcaaatactcaaaaacacacccattttctcagaacaaagcgagaaaggccccctgggacccgactcaacaacaactccctagcagaaggagcctcgccctccctggcgccctccctcaccctccctggctgactgctggtttgattaacagccatgaagaggggggttgaaagcctacccccacttgtggtgaaaagccccagctttcaatcacaactcctccatatggcaagttatttacctccacggagccttggttttttacccataaacccaaaacactacctcagacagttgtacaattaactgaaatatctagaacagtgcaagctgaagatcttttttttaaggctggctgggagaccccatgtttaaacataaaataaataaaatgaagtttttatatatttttatttattgattttgagacagagtctcactttgtcacccaggttggagtgcagtggcgtgatcatggctcattgtagcctcaacctcctgggctctgagcaatcctcccacctcagcctcctaagtagctgggactacaggtgcacaccaccacgcctggctgatttttttagattttgaggtgacggggtctcaccatgttgctcaggctggtctcaaactcctgggctcaagcaatcggcctgccttggcctacccaaagtgctgggattccaggcatgagccactgcatccggccttcaggtggggcatgtgctctccaggttgtggtgggcctcaagactcactggagtcacctgtcagactctggaaagcattgtttgtcatcctacttagagctgtggtccagagcatgttaaaacacagacagctgggctccactgccgggttctgagccagcaggtctggggcaggacctgggaatatgcagctccatccaacaagttcccaagagatgctggttctgttgctgctggtccagggaccacactttaagaagccctaccctagaatctgaaggctggaaagtacattaaaggtcacccagaatggttccaagaggagccagaatgtacccatgcctcttgcctggtccagtcctgctgttgatctgactctcagctcttccatcttgagcctcagacacaggcagggctaagggtgaaagccccaaaactctgatcatcactcaaacaatctgtggcccctactggtcctgtttatcatctctcagcacttttggggtccccaggctgttgcctccaacctccagccaccagccctcacctagagcttgctcccccaacaaacgtgggctccattctgcccgtccaggaatagacaccagtggctggaggaatcaaggcagggaggttggagtccaaggcccacaggtaagaggaggggcgcagcagagccctggaacagctgatttgagacaagcccctccatcttgagcagagcctggagacagtggttttcctggaggggggccccggacagacacacactgtacccagtgtccgggccacacaatgcacaagaggccagtggggcaggcagccagggcccactcatgccagtaccatctgggagcccttgccaggcctcgcagggctggctgaagaagctggactctgtcctggggcacagtcgtgctctattcttatctcaagggggaatgtgtgactctccttcccgtgaatgggggcccctgaggaggcggagtgggaaacagagccgccactgtgcctgggcgggctccccgcgcggctcccagctccaaccagcccctcgtggcggggccttgcactcaacaagaaaaggccaagctgaaggtggacatggaaatgacagtccagagcccagtgcaaactgcccctccctcactctgcaagacttgagcccgtgaggcctgaccagaaacacacactcactccctggagagacccaatgggacgggctcctaaaggaaagcgcagcctccacacaacacagttccttactaaatctcgaaggaaggaacccagacatcctaggcaccccacacatgcgcacaaatccccactggcagatcggggctctggcctgcctagctcccacagcacaccatttgcaggtggctacagatctcatgatttgctggctctctttcggcctgcaaatgccaggcttagccagcgaatggggcactggatattctcaaggacttggtacaacctttctaaagagcagtgtggggccgggcacagtggctcacgcctgtaatcccagcagtttgggggggagctgaggcatgtggatcacctaaggtcggagttggagaccagcctggccaacatggtgaaaccctgtctctactaaaaatacaaaaattagctgagcatggtggtgcgcacctgtaatcccagctactcaggaggctgaggcaagagaatcgcttgaacccgggaggtggaggttgcagtgagccgagttcgcgctactgcacttcagcctgggtgacagagtgagaatcctcaaaaaaattcaataaataaataaaaataaagagcagtatgacaccatgggtcaaaatgtgcacttgagtggtccacatttcctggaaattactctccgtgcaaaaagatatcatcacaaggaatggttatcttcagtaatttttaatagcagtaaaaaaaaaaaaagggggggtgtggaagaacctcagtgtccatcataaggggattgcaaattaatagtttatccaaattgtgactaacaaacactaaaacaaacctgtaaatatatttaatgatagaaatatattctgagaatattaaatttaaaaaaaataggtcaaggctgggcgcagtggctcatgcctatgatcccagcactttgggaggccaaggcagatggcttactggaggtcaggagttcaagatcagcctggccaacatggtgaaaccccatctctactaaaaacacaaaattagctgggtgtgatggtgtgcacctgtaatcccagctactcgggaggctgaggcaggagaatcgcttgaacatgggaggcagatgttgctgtgagccaagatggtgccattgcactcttgcactccagcctgggtgacaagagcgaaactccatcttaaaaaaaaaaagaaaaaaaaaaaaggtcaaacaactgtgtgtataatatgatcataaaaggataaaatggggattgttctttctttcccagttggatgaaagaggggagtaaagggtgatggggagatgaggagggaggagggcagggtggtgtagagaatgaggcccgggtgtgagggggtcagctgtgggtgggagccactggccactgggggaattagactaagtcttgtttagccttcctctggaagggccttaaaggatgatgaaaacatccggaaaatatttagctagtaaatctttcagaagcccctccaccctgtgttatttatataaacacttcccttccactcctctctaccctcacatacacccgccccgattcctatcacagacttggaatcagcagagccagagagagctggacaaggctggctccatgtgcgttctgaccaccacgggtgcaacccatctgtgcagtatgaagcctgcgctgatgtgttccctggcccccatcgcagagcagccctctgacctgccagggacccacagcaggggtcgggggtggtggccacactatttgggttccctggccaccaaatctccagcagtgattgtcccagggactcaaggaaggggaagggttaaatgggggagtcgcttctcagacaggagaaagtatttgctctaatcctgtccgttctcctggaacttcctggagttctcagggaagaaacccttaatgaatggtgtgagggaaagagaaatcacatgcacatgaatgtgtgcatgccacacacacacgctcacacacacactcatacactcacacacactcttgcacacacacccacacactcacgcacatgcacacacaaacgtgcaaacacgcacacacaaacacgcagatgcacacacgcgcgcgcgcacacgcactcatgcacacacgcacactcacacccactcacatacacacaaacacgtatcacacacgcacacacaagcacacacacaaagagcgcacacacgcagacatgcacacactctcgaaaacacacacattcacacacacacgctcacacacatgcagacacactcacacactcgcgcacacacatattctctctctcaagatcttcctcctgctcctgagaagtgcccagaattcggggaagccactcacttgttaaacaacagccttcttttgagggttaggagccagtcccagcgtggggcacggggaagagactatgctccggaaccaagccggctctgactctagtcccagtgagagcacagcagacagtgaaccagttctggcttcaaaccccagctctgccgcttaagctgtgtgaccttttttaacctctttgggtctctgtttcttcccctagagagtcctggtatccttgaagggagattgcatcagaggctgggagtctagaaacctgggtgtgagtgcaggctgtttactggcctgaaggttggagccagcctgctggtaggtgctggccagcaccttacattgtttgttgttgttgttagtttaaatcaattggcaacattacacaattgggagagtgtggatttccagctggccatgtgttcccaatgactggctgatgctccctgcattttgaaccctaaatcaagttagtttaaccttccacggctctggacagtgagttaacaggaagccctgggaagaagaaagcagtgcttccacgagcccctcctcagatgcagcctcagcttgcgtcaggggaacgcctggtttccaggggccccatgttgccctctcacttttgcacagcctgctgtgtaaagatgaaccaaacatggcccaggaagtgagtgtgccagctggggatgagcaggtcaggaggcggggagtattgcacaccgagtccacggcctggaggagacctgggctcaagttcctgtggggaacgctccatttttctttgccccagcacctcatcaaacagtcccacccagcagccctgaaagtattttagctgtgcactcacagagggacagactcagggccgcaggacacaatcctcattcaagaattttaattttaaagatactaatctgaaccaggaaaacaccagatcttgcgcagaaaatcccccgattccagggctctgatggaaagcaggggcagaaggccccctccaaggtgtgaaccgaccccagtctctgtccccctaaacccccaagactgggcaagctccaaccaggcgaagtggactaggagaggaatctctgagtaaatcgagtaaatcctggaatcccaagcatctccttggaaatgctgattaaacaccagaacccacgcaaagatctgagcaaattccaggaccaccactcgggccacataagctctcaacggagcacacacacacactgagtcagacccctaaacatctggggcttagctaatcctctgctctcaggcgttcagcttggatggactccgaggggaggcagcaccggcgagggattcagtccagtttccagggagcccagccaggcctgggagccagggctcggccctaccccggctggggcccccgagtcacacacggaggccatgcgtacatcctccccagccctcaccagcagttccggggcggctccagtgcccaacccacacatgggaggtggaggccacagtgctccaggattccactctgcggtgcagacttcgagaggaaacaatttcctaatccccttcctaaatcaaggccaagaaacaacttgtggagagtccacagacgactgttccctctgcctggttgtccctgtgctgacctctggctgctcccaggagccattagagggagtggacgggaggggtggatgggagacccacaaacccacagcccgggattccatacttgatacaatcagttctgagtatcaatccacagatcattgaattccaaagctagctgaggccaaatgcctccccctctcacccccttaactaggccagaacataaaacccagcatttcattacttacatttatgcaacaacatcccttgcctgttttcattttcagtgaaataagtgatcgttttgctttttcttttctcttttttttttttttttgagatagagtcacccacgctggagtgcagcggcgtgatctcggctcactgcaagctccgcctcccgggttcacaccattctcctgcctcagcctcccgagtagctgggattacaggcgcccaccaccgcgcccagctaattttttgtatttgtagtagacatgggttttcaccgtgttagccaggatggtctcgatctcctgacctccctcgtgatctgcccacctcggcctcccaaagtgctgggattacaggcgtgagtcactgcacccggcctgctttttcttttttcaaattccaaaccaaatgatcttttaacctaaataatcctgattgatttggtatctccctgtgggtcagcagacatatatgagaagacattttttcaccctttgacttaaataaataacataggtaagaggagccttgatagcaaaaacgccaagaccactcaatgggggaaagggccatcttttcaacaaactgctgcgatgagagatacaaacatacaaaagaatgaagctggactccttgctcacacggcatacaattaactcaaaatggatcaaaagactaaatgtaagagctaaaactagaacactcttggccaggcaccatggcttatgcctgtaatcccagcaacgatgggaggctgaggtaggtgcatcacttgagctcaggagtttgagaccagcctgggcaacgcaggaagacactatctctatgaaaggtttaaaaattagctgggcagggtggcacatgcctgtagtcccagctacttgggaggctgaggtgggaggattgtttgagaccggaaggtcaaggctgcagtgagctatgatcacaccactgcattacagcctgagtgacagtgagaccccatctcaaaaacaaaacaaaaaaactcttcaaaaaaataggtgtaaatcttcatgaccttcttagactaggtgatgccttcatagatatgacaccaaaagcacaaggaatcaaaggaaaaaatcggtaaactggtctttattgaaattactaacttttgtgttccaaaggacatcattaagaaagtgaaaagacaaaccacagaatgggagaaaaattttgcaaaccacgtatctgataagggacttttatctagaatatataaagaacacttacagcccaataattaaaagacattgataatgtaactcaattacaaaatgggcaaaagctctaaatagacctttctccaaagaagatacatgaggcagggcatggtggctcacgcctgtaatcccagcactttgggaggccaaggcaggtggatcgcgaggtcaggagttcaagaccagcctggccaatatggtgaaaccacgtctctactaaaaatacaattagccaggtgtggtggcgcgcgcctgtaatcccagctacttgggaggctgaggcaggagaatctcttggacccgggaggtggaggttgcagtgagccaagatcgtgctgctgcactccagcctggatgacagagcaagactcagcctcaaaaaaaaaaacaaaaaaaaacaaaaaacaacaacaaaaaaacatgaatggtcaataaggcacaagaaaagatggccagccaacaccagtagtcttcagggaaatgcaaattaaaaccacagtgagataccacttcacacccactagaacagctatgatttaaaaaaaaaaaaaaaaaaacgtagataattaccaatgttggcaaggatatggaggcattggaaccctcatacgatcctggtggtacagcagccttggaaaacagcctggccattcctcaaaaggttaaacatacttaccacgtgacccagcaattccacccctggatatacatccaagaaaattaaaaacacatgtccacccaaaaacatgtacacaaacgttcataccaggattcctcctaaagagccaaaaagtagaaaccaaccaaatgatgcccaccaactgatgagcaaataaacaaaacgtgatctatccaaaccaatgaaccattattcagaaataaaaagaaatgaagtcctaatacatgctacaaggagaaagagcctcaaaaacattctgctaagtgaaacaagccagacacaaaaggctgcatattatattgttctatttataagcaatccccagaataggcaaatctatacagatggaaatagataagtggccgcctaaggaaggcgtggttggggggaacgggaagtgactgctaatgggaatggcattgctttttgaggtgctggaaatgttctaaaattgatgatggtaatgattgcacaactccatgaatgtactaaaaaccgatttatacactttacaggggtgaattgaatggtatgcaaattatatctccataaagccgttatcaaaacataaaaggtatcttgctgagtttgctattacttccacacccaagccaaggccacgactactttctgaaactcctccctgacccctccaggttacccagaacttttcttcctccccagcgtgcctcttgccacagctatatctagacctcgaagagcagcgcttacttggtctctgtttacctatgattactgagttttactttcccacctaaactttaagtttctgaacacagcggggcctgataattacagccaacattgcttgggttagcaatcagaacttcaaagtctcatgtattcctgggcagggtgtggtggctcacgcctgtaatcccagcactttgggaggccaaggcaggcagatcacttaaagtcaggagtttgagaccagcctggccaacatggcaaaaccctgtctctaccaaaaatacaaaaattagccaggcgtgtggcacatgcctgtaatcccagctacttgggaggctgaggcacaagaatcgcttgaacccgggaggcggaggttgcagtgagccaagatcacaccactgcactccagcctggacaacagagcgagactctgtctcaaaagaacaaaagaaaacaaaacaaagtctcatgtattcctgtattcctgcatgtatgaatacatgtactcatgaacatataacatgtactcagtgaatacatgtactcatgaatgtatgaatacatgtgctcatgaatgtatatactcatgaatgtatgaaaacatgtactcatgaatacataaatagacgggctcgagaatgaatacatgtgctcatgagtgtattaaaacatgacatgaatgtataaaaatgtgctcatgaatgcatgaaaacatgtagtcataaatgtataaaaatgtactgactgcatgaaaaggtactcatgaatgaatacatgtgctcatgagtgtattaaaacatgaacgtataaaaacatgttaatgcatgaaaacgtactcatgaacatatgaatacatgtactgacaaatgtataaaaacatgtactcaatacatgtactcgtgaaggtatgaaaatgtactcaatgattgcatgagtactgcatgaaaatgtacgcatgaatgtatgaatacatgtactcgtgaacgtatggatacgtgctcacgtactcacaattctttcacttaccccttttgtttcctaaacatctggtgcccataactaaatacttcttattcagatttacctgatctttgctcaggtgatgatagctggcaccttctcccctgaagaatgcctcttccttttaaacctggtctaacttgctgatcttcaacctcaccccaccaccctacgtgcacacccatcatctcagtctttgtctactcgggcctgactccgtctccatgtggtatcacatttaaagaaacatcactcaagcatcattcaaaaattatttttggccaggcacggtggctcatgcccataatcccagcactttgggaggccgaggtgggtggatcacttgaggccaggagtttgagactggcctggccaacagggcgaaaccccgtctctactaaaaatacaaaaaaattatccgggtatggtggtgcgcgcctgtagtcctagctgcttgggaggctgaggcacgagagtcgcttgaacccaggaggcggagggtgcagtgagccaagattgtaccagtctgggcgacagagtaagaccctgtctcaactaaaaaaaaaaatcatttttaaagcaatttaatctttaaagtctcttttaaaaaggctgggggaggggcttcattcataacatgtagcaacatttaaaatttcatccccttctttcaaactgactcacaggcttagcagctgcacctccgacctccaccccaacatccctttccttcttttcaccgaaagactttaaattcctcccaagcccctctgacttggtctttctcccctgcaggcatccttctctgaaagacacacagaccaacagacagaccaactctctcacatatacccctcccttcaaaatcagtcctgtctacttttttcaaattttataattagattatatatttttatattttttttttttcttttttgagatggagtctcgctctgtcgcccaggttgagatcgtgcagtggcactcagctcactgcaacctccacctcctgggttcaagtgattctcctatctcagtctcccaagtagccaggattataggcaggtgccactacacccagctaaactttgtatttttggtagagacagggtttcaccatgttggccaggctggtcttgaactcctggcctcaagtgatctgcctgcctcggcctcccaaagtgctgggattacaggtgtgagccactgcgcctcgccagattttattttaattaacaaattaaaattgtatatatttatggtgtacaacatatatttatggtgtacatacactgtggagtggctcaactgagctcattaatctacgcattactccacatacttatttgtggtgagaacaattaaaatccactcttttagcaatttttaaaatataatacgctattattaactatagtcaccatttcctgaacttaatcctcctaactaaattttgtgttctttgaccagcatattccccacccgcaacccatagccccaccccacccagcccctggtgatcaccattctactctttgcttctatgagttcaacttttttagagtccacatataaatgagatcacatggtatttatctttctgtggcctggcttatttcactttgcataatgtcctctgggttgatccatgttgtcacaaatgataggattttctctttttttaaggtggaatagtttgccattgtgtatatatacaggttgggcattccatacccaaaaatccaaaaccaaaatgctccaatgaccattttctttgagcatcatgacagcactgatttgggatgcctgacctgtaccacattttcttttttcttttttttttgagatgggagtctcgctctatcgcccaggctggagtccagtggcgcgatctccgctcactgcaagctctgcctcccgggttcatgccattctcctgcttcagcctcccgagtagctgggactacaggcaccatccaccacgcctagctatttttcttgtatttttagtagagacggggtttcaccatgttggccaggatggtctcgatctcctgacctcatgatccgcccgcctcggcctcccaaagtgctgggattacaggtgtgagccacattttctttatccactcattcattggtggattccctctctgggctattgtgaacaggactcaatgaacacaggagggcagacgcctcttccatatagattttatttccttcggatatatacccagtagtgggatccctggatagtatggtaattctatttttaattttttgtggaacctccatcctgttttccgtaatagctgaactgatttatattccccaccaacactgtgcaaagatcccttttgctctacaaggactggccctttctcttatcctgaaattgatctaggacaggtgagccccaaagtggggcctaccccataagggttcttggcttcccccaggaaagaattcaagggcaatccatgtggtaggatggaagaaaacaactctattgaagccacagggttatagccctgtgactatagccctgtgaccgccgctgcagagcagggctaccccctgggcagacagtagaagctcggggcagttctgcactcatatttacatccactttttttttttttttaagacagtctctcgccctatcgccaggctggagtgcagtggtacaatctcggctcactgtcacctccggctcccaagttcaagtgattctcctgcctcagcctcccaagtagctgggactacaggtgcgtgccaccacgcccgggtaattcttgtatttttagtagagacggggtttcaccatgttggccaggatggtcttgatgtcttgactttgtgatctacctgcctcggcctcccaaagtgctaggattacaggtgtgagccaacgcagcccggcctacatcctcttttaattacatgtagattaaagggcagtttacacagaaatttctaggaaaaaggtggtaattctggggtcctcagtcagtgccatggaaagaggcagtaatccccaggtgttgccatggcaatggtaaaatgacctggcgcagtggtgggtgtgtgttttggaaagctgcttccaccctgcctctgttttagctagtcttcaatttggctgggtgtccaaggcccacctccagagtcaagtcccaccttctgcttcaaaaccagcttttcagacctctgcaatgttgtccctctgtccattgctcagactggctcttcaccagaaagtccagggactgagcccgcccgagagatttctcttcgattaagggggtgagcagctataaatgcccccatcacgctctgctggtttatatctgtttaagttcctgatctcgtcttttaatgttgtttttaatgtgtggtttcccatctccacgtggtgggaataagccagcagagagggcacaatgccttctttttctttcctatccacccacagctctggtaccacctctgagctccatgtccaataagcttatgagacccactgcagacatccacagacctccgaactggggggaggggggtacccaccagcaaaggaggatgttttcaatgctcaggcctggatgcctatgctctgagaaggaaataaattgtcagcagaagatcaacagagaactcaacttagcagaaaacagtaggggaagacttgaggctgtaatattagggagagatgaagacgagactttttggagttcagatgtggggagacagtttaaagaacaagagcatgacttagcgagttggccccactgagcaggggggtggttcagctcggaacaacaccaaggaccgtctgaagggaccagacactccgaataaaaacaaatgcctcccaaatgttgtctccgtcttctattaattaatcacaatgtccccatggcgaagtgtcctatgactaatgcaaactgtaactgtgtggcatgaggccaacttgctcatcttcctttctgaacaagcctccccagatccacgggggaggctgggtgagtggggagccacttcctctgggtatcagatcaaaccatgaaatctgtttctgggttgggcctcagaaaagaatttctcctggggacatccaaaccctttagttatttttgacacttagtccagccagaggtttggagagttgctggggctaagctcggggtttctcccaactccgcatcaacggtgctgtggaaaaggcaagccagattttccagactggggaaggcagcgcggctgatgcattttcttctcacaggaaaagccaactagctgtcccaaagatgagatcttcaatgcactgcaaatccagacagcacctcctgcaaaaagggactcaaatcctccacatgacaccatctccactgttatcatcccagactgagtgacccctcgcatctgtccgtctgcctcaatttaaaaccagcttcaacctattctgcatggggcagccagcgtgatcctgcaagacacgaagactgattgtgtcgcctacagctcaccagcctccaaaggcttcccttcacgcttagaaaaaaacagtgggagggacacaaattcctccattatctgaccctctttgacctcttagacctcaaatctggccaggcatcgtggctcacgcctgtaaaaatcccagctctctgggaggctgaggcaggaggatcacctgagtctagaagttcaagaccagcatgggaaagatggcgaaaccccgtctctacaaaaaattagtcagacatggtggcgcacacctgtagtcccagctacccaggaggctgaggtgggagaatcacttgattccaggaggcagaggttgcactgagctgagatcacgccactgcactacagcctgggcaaccgagcgagacccagcttaaaaagaaaaaaagagagagagagagaccgcaaatactctccctctcctacctgctcacccaactcgagcttcgtgggcatcaccgccattcctcagggtctttgcacttgctgtttcctctgcctggaaccttcttccccagatttccatatggctcattccctctccattaagttctctgctccaatgtcacctcagagaggtcttttctgactaccccatttaaagtaaacttccccacaacctgcccccctcaccctcacccctctcccccactttatttatcttcatagtatatatagcttagctgacatgtatatgagtgtttgtttcttagaatgtaagctgcacagtgcagggaatttgcctactttgtaactgctgtattccctgtgtctagaacaattcctagcacagtgaagttttctcttttttttttttttgagacagagtttcactcttgttgcccaagctggagtacaatggcaggatcttggctcactgcagcttctgcctcttgggttcaagcaattctcctgcctcagcctcctaagtagctgggattacaggtgcatgccaccacaccaagctaattttttgtatttttagtagagacggggttttgccatgttggtcaggctggtctcgaactcctggcctcaggtcatctgcccaccctggcctcccaaagtgctgggattacaagcgtgagctaccgcgccagaccacattgaagtttcttaataaatatttgttggaagaagggagggagggaaaggaaagagtttttggttgaccaaggtacagtaaataagatcaggtcccttcattttatacttttttcaaggttttttttttctttttttgagacggagtcttgcttctgttgcccaggctggaatgcagtggcacaatcttggctcactgcaagctccatctcccgggttcatgccattctcctgcctcagcctcccgagtagctgggactacaggcgcccaccacagcgcccagctaatttttttttgtatttttagtagagaccgggtttcaccatgttagccaggatggtctcgatctcctaaactcgtgatccgcccgcctcggcctcccaaagtgctgggattacaggcgtgagccaccacatccggccaaagttcttttacagatgtgaaggcacttaaataaatgtaaaggaaggacttcttaactcatgattatccttccaactccctagtaaggaagggaggacatgcataactatcgccattttacagaaaaggaaatatgaatgtgggatatttgttaaagggaataataaaacatactggcttgtccaggtcaaatttgaaattaaaaaaccaaactagaggctggacgcagtggctcacgcctgtattaccagcactttgggaagccgaggtgggcagatcatggggtcaggagtttgagaccagcctgaccaacatggtgaaaccccgtctctactaaaaagtacaaaaaaaattagccaggcatggtggtgcacacctgtaatcccagctactcaggaggctgaggcaggagaatcgcttgaacccgggaggtggaggttgcagtaagccgagatcgtgccactgcactccagcctgggcgacacagagagactccgtctcaaaaaaaaacaaaaacaaaacaaaacaaaaaaaacaaacctagaactagaatcgaggtttccaggtactctgtcctatgctctttccatcaagtcaccttggatttcaatattctatcctgctagaaagtctattcatattgttaatcatattaatatttcaaaaatgaaaaaaatatatgatcatcttgagagatgctgacaagacatcatttgataaaatcccacatctatttgtgcctttaaaaatacctcttcttggtattagcgccagcctagttttatattctccaggaagacactgaaaaacagacacaaaaaggacattaaaatgctaaatagaaaatataaatgctatctaaaaccaacagccagtatcggagttatgaggaaactccagaggaattcccactaaagacaggaacacagctatttattagcaacattctggaaccatgtatcatctataaccaattttaaaacataactaaatttcactcacaataacaagaagaaattatcaacatcctaagaataaacctaacacaaggaacatacaagccctacgtgaagaaaccatttgtccaggggacagagtctaacttaattatgtagagatattatgttcctggttagtatcaagaactgtgaaaggtctgagatttcttatcccaggtccaggagcaaagtgagatactcaacattcttaattccatttaatctaattaataactctgcaatttgtattattattccccactaatgaagaggcacagatcagataatttcacacagcaaggaagtcaggattacaatttaaatagttctgactcccaagcctactgtcttcctaccagctcactcaatcttctagcaatgtgatggctttctactgtgtcaacatggctaggctgaacttcagttcccagaattcctttccttatacattctgcttagcgtagaccacaggaagatttctgggagatatggtgcgggaaagggaagaagcagagattctgcagctcaaacacattgttgctgatctgctgacttgcctcactggcataaagcagtggctaggcccacaactgctccaccctctcctggagcttttgtcagcttatccaacccctgagccaggatacattggttaggtccatgacacagggccccagattctgcaggatacccacactatcaaagtcaaagacaattttattccatccttgtggggttccagctcatgcccacaggttctagcctgctcatgatcttctcttcttaacttcacctttcccgtagacttcaagctccagcatcagacattgaaatgacagcccaacagagactacttagccagccccacaatgacataagactaatattctgtaaaaactctcttttaaaatgcaggggctggacatggtggctcacatctgcaatcccagcactttaggaggtcaaggcgggaggactgcgtgtgcctaggagatcaagagcagcttgtgcaacatatggaaaccctatctctacaaacaatttaaaaattcgccaggcatggtggggcatgcctgtggtttcagctacctgggaggctacggtgggaacatcatttgagtccgggggttgaggctgcagtgagccgtgactgccactgcactccagcctgggtgacagggcgagaccctgtctcaaaaataagtcaataaataaaaatgtgtatatctgcatttgtgtgtgtgtacctgtgtgtctatgtctatgtgtgtatatacatgtgtgtctgtggctatatgcacgtatgtctatatagctagtgtatgtgtctacaactgcatgtgtgtttatgtacatgaatatgcctacatctacgtttctgtctgtttctcctactcattctgcttctccatgcaaaccctgactgacacagctaattgctcctcactgtaagtccacagaataggtggtcatggagtgggagtgtccctagagaagctggagatggaatgctgaaggctggggtagtggaaagccgtggagactcagtctgctactctgcccctctaggctaacagattaaaacaaaaagagtcacttgtatgtgcacaacactgcagatacaaatgctaaagatgcagggtcccacactggccactatgcctcaatggctcccccaagcagggagtgggacacagaggggtctccatcaatactgccagcttctggactggccccaccctggtgtgcacccagctatgcccctctgacagccacagaaaggctgcttctggggacccagggaagtggctccagggccctggccctgactcacttctggaatttcctgccttgggaagctgctcacaggtcacatcaaggggatattaaagccactgcttaggggccgggcgcggtggctcacgcctgtaatcccagcactttgagaggccgaggcaggagggtcacgaggtcaggagattgagaccatcctggctaacacagtgaaacccgtctctactaaaaatacaaaaatttagcctagcgtggtggcgggagcctgtagtcccagctactcgggaggctgaggcaggagaatggtgtgaacccgggagacggagcttgcagtgaggcaagatcgcaccggtgcactccagcctgggcaacagcaagactgtgccaaaaaaaaaaaggccactgcttgaatgagtgcctgagcacccctgaagagacacacccagattcccagggtagatccaagtcccactaagacctgcagctctcagttactccctccacagagcccggctccaaagagggaggagacgcagtttcctaaaatgtgcaggcccaacaaggcagcatcaaggccaaagctctggaatcacagactccagggcacattccagctctgccagatactaacataaatggccttgggcaagttctggtacctctctacaccttgaattccccacctttaaaatgtgtatgatagataccatacaatgcaacactgtggaaagggttaaacttttacattttctttaaaaataaagtataataaatgttatttttgttaagattaacacttttcagaataactctgtcaagctcatggtgatgagtcagtaggcactgcctaaaaagttgaggatggcatatattaaaaagttacatagtaggccgggcgcaatggctcacgcctgtaatcccagcactttggggggccgaggtgggcggatcacgaggtcaggagatcaagaccatcctggctaacatggtgaaaccccgtctctactaaaaacacaaaaaattagccgggcgtggtggcaggtgcctgtagtcccagctgaggcaggagaatggcgtgaacccgggaggcggagcttgcagtgagccgaaatagggccactgcagtccggcctgggcgacacagcgagactctgtctcaaaaaaaaaaaacaaaaaaaggtacatagtagttacaaagataactaccagaactaaaagcagattgtaaatctttcaaattattggaagaaatgtacacacaaagtcaataaaactgatcatatagtaaataacatattattaaaggttttgtttgtttgtttgttttttgagacagagtctcactctgttgaccaggctggagtgcagtggcacgatcttggctcactgtaacctctgcctcccaggttcaagtgattctctggcctcagcctcccgagtagctgggactacaggagcgcaccaccactaccagctaattttcgtatttttagtagagacggggtttcaccatgttcgccaggacctcaggtgatcagcccgcctcggcctccccaagtcctgggattacaggcatgagccaccgtgcctggcctattaaaggtttaaaaacagaaaacataacataaaatgacagaactaaaaccaatcataactcttacagaaaaagattctgaggtatccccaatatatttcaaacttagataattttttaattggttgcaaccttgatccacccaaacagttctatatgaggatgcaggctgaactcacgggggttcagacatcagtaacagggagtgtgtcatgaacttgaactgtgtcctcccaatccaaaaaacaaaaaatctagcctgtaatccccgcactttgggaggccaaggtggccggatcacctgaggtcaggagttcgagaccagcctggccaacatggcgaaaccccatctctactaaaaatacaaaaaaaaaaaaaaaattagccaggcataatggtgggtgcctgtattcccagctacctgggaggctgaggcgggagaatcgcttgaacccgggactcggaggtttcagtgagctgagattgtgccgctacattccggcctgggcgacagagacagactccgtctcagaaaagacaaaaaaaatctgtatgttgaagtcttaacccctagtaactctagatgtgactataattggagataggcggccaagcgtggtggttcacacctgcaatcccagcactttgggaggcagaggtgggtggatcacctgaggtcaggagttcaagaccagcctggccaacatggtgaaaccccatctctactaaaaatacaaaaaattagctgggtatgttgtgtgtcccctataatcccagctactcagaaggctgaggcaggacaatcagttgaacccaggaggcagaggttgcagtgagccgagatcatgccattgcactacagcctgggcaacgagagaaaaattccgtctcaaaaaaaaaaaaaaaaaattggacataaaggtaattaggttaaaatggggtcatgagagtggtcctaatccaacatgcctggtgtccttataagaagaggaaattaggatacaggatacagacaggtacagagggaggaccacgtgaggacacatggagaaaacaagccaagaagagcgacctcagaagaaactaacctgttgacatttatggtctcagacttgtagtctctagaattgcaagaaaacagattctgttgtttaagccccacaatccatggtactttgttaaggtggccctagcaaactcacacgtgtctgtcaggttgcatgggcaaggagggtgtcacagttagtgccaagcatgtgagtgtgctggaaaatggaagtgacaaggagggggcttaaggtaggcccatccccacccattccccacctagcccagagcctcaaagctgttggcaggaagagctaagaatactcagagctctgccaggcagtgggctccatattccagcagcttggagcagggaacgggggactcggagcggcagaaaagcaaggcctgctggcaagatgtgattgcaggagactctagtaactcaaggactgtggggtacagagaaggctagtgactgtttcccctttggggtcctgttcaaagctggggactttgcagctgtgcccacctgctagttttactctccctaaaacagagccaggtatgtgttctgaccatggctgccgaaagacgcccaggaggacaggtgagcctctgcttctcataggcagtgtcgggcccgtgatattatcccaaagtgaaggggaacaaccatgctcagagcaggacaggccccaagaggcatttttggggcccttaaattctatcaaagttttaagatcaacccaaaatgagtggccaatctcggcagatccccagtatcaggtaagaaaggatctggtaaattattacacaaatccttttctgtggatgttaatttcttttttttcttttttcttttaagacagacatgctctctcgtccaggctggagtacagtggcgcaatcacggctcactgcagctttgacctccagggctcaggcaatcctcccacctcagccccctaagtagttgggaccacaggcatgcaccagcatgcccagataattttggaaaacattttttctagagataggatcttgctatgttgcccaggctgttcttgaactcctgggctcaagcaatcctcccaccttgacctcccaaagcactgggattacaggcgtgagccactgcgcctggccagttgttacatttctaaaaaaaaagtcttttatgtctttgagctaggtaagaactgcatggcaggtacaacaggccagatcaatagttcctgcccgtctctgattagaaccttctagaaaccaaaccataatcagagacaggcaactggatgaggaaggacggaacaatacatgacagaaggagttagtaggttccaaacggtggctgggccatggtgcaggaatggctgctgcccccaggcagaaaggagaagaccaacagaaatccacagccccacactggcagacagcctggctcagctcagggctgcagacgccctggtgtctggggctgacagccagcagcaccggggcaggtactgctaaggaaaagaaccgcagagacgcctgcattcaatgctcaagtgcacatcaaaaggaaagaaaacactctctgtatatcagagaagcacgggggaaagtacacaggaaggaaaatggaacttcagggttcctctggagcaagtcatgcctgggtgaatctaaagaaaaggtgactggaggaagctcaggcagtgtgtaagacccgaagagctctccaggcgctcactgtcagaaaagttagctctaggaaggaggcagtagaggcttggatgaaaccttacaaggccctagaaccaggccctggtggcctgtcctgggcaacattgaggataaacagcactcaggccccccaggaccaagttctgagttcctgcagcagcagcagccggatctgtgccccaatcctggcatgggttcagggggcattggcagttccgctgtttctgccagggatacaaccacgcttgctgctgaacggacagtatagctgggccaggtgggggaggtgggctttaggggccagggcagatggcccaggagtcaactgagggaagggggaaacagcaatatattctaagacccccccagaaatgagagacacctcccagctctctaagggcagtaaccctggagttcaatgaagtggaatggctcattattttgtttttgtgggagcaagaacaaccatctcaacaatgagaacttgcccccgtagtcccaaagccaggatcttcgtgggagggttccagagggtgaggcccaggccctctgaaccagcagacccttgtcatggatcaggtcctgcgctgatggaccttgagagaatggtggctacagaggacaaatccagaaaaggcatccacacacatgcaagaaggcagaggaagcatctggttctccccaaactcgggggtaaaactgtccacatcgagcaccaaggcaccctgaacttccacagaaccaagttagataatcccagaactttgaggtatctgggcccaaaactagtattaaattgaaggcgcagataagaaatggaatgttttcactttttatagcccagtgtgcccaaccagtccatcaaacccaccttcttcccggggcaaccctagaaaagatgtctcactcaaagacagccctggagagcaagtcctggccaagttttcccaattatgactgcatttcacatctttctttacaaggcaaagtccccgcaagagtcagggagtgaatcctccagagcctcgccacttagtgtggaccacagaccagcagcaccagaatcacctgggaacttgccagaagtacagttgttcaagccccactccaaacctactgaaccagcagctctgggaggaggcccagcaatcagggtttaaacactccctccaggagactgtgatgctctctcagcttggacgctttcaaaactgaccacctcagtatgaaacaggctaaaccatgctcaagggttaacagcgtaaagatctctggccgggcgcggtggctcacacctgtaatcccagcactttgggaggccgaggcgggcggatcacgaggtcaagagatcgagaccatcctggctaacacggtgaaaccccatctctactaaaaatacaaaaaattagccgggcgtggtggcgggtgcctgtagtcccagctactcgggaggctgaggcagaatggcataaacccgggaggcggagtttgtagtgagctgagatcgcgccagagcgagactccgtctcataaaaaaaacgatctctgtcttcctgtagttagacaataaaaattccttcatttaggacctactgtctctgaatctgtactcctgtgggcattcgaaattgagatttacctattaagtcaagaattacagtaagcaagaaagaagccaaaagccctcttcaaatgcttagtcacatggtttgccattttttttaatatgttaattacaaactactgatccatacctactcaattagcttttaagcactgaaaagtactttgttcaacatacttgcacatattccactgtgtgcctggtttatggcttttgaataaacaaataggtgttttcatacttccaggcaaagccagcagtggggcttgggtgggggcagagggtggcgtgtatgtgtctgcgtgtttaatcacagcgaagtataatacacaactgcctctctgaaatttacaaaaatgctcagacaacctcaattaagctgatttctaaaatacgcagacaaaaggaaacatcctcaaagtttctgtaaacggtttttgagcccacagctgagcctctccaccagtctggaatttactagctactcaaaataacaggaacatcctaatattgcctcttacagctcaaaagtaaggcttttagatcagccaagggggctaagaaacctcacatgcatgaacacagaaaatacacttgtaaaaatatactgggcaagtgggcttgtacacacgtgttgggatcaagggtacaacacggcatttctctctcatgccaaagatccaaatatgatgtttatcgaagcttcccaaagccaagctcaaactctattaatgtgaatcttgggggaaaaaatcagagtacctttatctagattttttaaaacggtgtgaacactgccaagagctcataataaaaagagtacagaactccaagtcaaaaggtctgaatgccaagtctgtcttttaccaactgccacttcctaacctggccgcaaatcacaaattctgaacctcccatgtccccagctgaaaaatcaagatgatggaaatagtaactgcttgttggagctcaaggagctgctgtgagagccgatcatgtatctcatgtgagagcacctgaaaaatcataaagcacacgtgaacatcaattattggctagcacaggcatttttgatttaggagcttgagaaagagggagtcaaaaaaagaacacagtttttttgcacttttatgtttcttggttgtgttctggtgttggaggttatttttgtggggtgaaaagctgcctcgttggtttcggttaacctagacctttcttcacctgcatcccttggataactgtttgctgctggttaagaatcctctctcagttaagagccagacgcagcggctcacacctgcaatcccagcactttgggaggtcatggtgggtggatcacaaggtcaggagatcaagaccagcatggccaatatggtgaaaccccgtctctactaaaattacaaaaaaaaaaaaaattagccaggcgtggtggtgcatgcctgtagtcccagctactctggaggctgagacaggagaattactcgaacccgggaggcggaggttgcagtgagccaagattgcaccactgcactccagcctgggcaacagagaaacactcaagaaaaaaaaaaaaaaaggccaggcgcggtggctcacgcctgtaatcccagcactctgggaggctgaggtgggcggatcacgaggtcaggagatcgagaccatcctggctaacacggtgaaaccccatctctactaaaaatacaagaattagctgggcatggtggcgggtgcctgcagtcccagctactccggaggctgaggcaggagaatggcatgaacctgggaggcggagcttgcagtgagcagagatggtgtcactgcactccaacctgggcgacagagaaagactccgcctcaaaaaaaaaaaaaaaaagaatcctctcttgaacagaacggtatcaggtcaactggatgatgaataaatgatggagaaccctggcccatatgatccaataaaccatcttcctgctccagaaggttgctgcaaggcatgtcagcctaaatagaagaggatccatttttgttcatttttatgtatttattttgttttatttattcatttattttgaaacagagtcttgctctatcacccagactggagtgcagtggtgcgatcttggctcacttcaaccttcatctcctgggtttaagcgattctgctgcctgagcctacagagtagctgggattacaggtgcccgccaccatgcccaactaatttttgtatttttagtagagacagggttttgccacattagccaggctggtcccaaactcctgacctcagttgatccacccgccttggcctcccaaagtgctgggattacagacgtgagccaccgcgcccggccccattttgaaataacatatctcaccttatagaattttaggatactgcagccgaagaacacaaaaaccaacttatatttttgtgactttccatcaattccatttgaggattagaggtggaaaagaggtagaaacagtttggcagttctttattaagcacagagtcctcatacaatctagtaattccactcctagctagagacccaagagaactgaaaacatgtcccacaaaaaaacttgtacaccaatgtttgtcacagcattattcacaatagctagaaagtataaccaattcacatgtccatccactgatggacaggtaaaacgtggcatatcgggataatggaatattattcagccatgaaaaggaatgaagtgctgatgcatgttacaatacagataaacctcgaaaacattacactaagtgaaataagccagacacaaaaggccagatatcatgtaacattattctgtttctatgaaatgcctagaataggcaaatccacagagacagaaatcgattagtagttgttggttgttaggggtaaggagatggggtgaatggggagtgacagctaacagggaaggggtttctttctgaggtgatggaagtgttctgcagttagtgaatatattagaatactacacagtgaatatactataaaccactgaactgtatactgtagagagctgagttttacgttatgtgaataacatctcaataaagaaaaaaatattaactattttttaaagacctagaaatagtggttaaccaactaatcaggaattaaaagggcagcataccaggtgatgactcattcaccaactcccaagaggaagtgtggttgtgacatttacgttgatttcatctgacctccaacctcaaaccccaggcactctcttgcacacttcaactttccgttttcctttctcccttccgcccattcccctttgactctttccttttcttcctctccttttcttctctttctttctttctctcaactggttaagtacacacacacacacacacacacacacacacacacacaaagtgtaaatggatacagtgaaggtagtgggcttttgaaatgtaacttttctccttgcctatagaagttgttgaatgaacacctatgagaggcagcaaattggagtcatctggactcagtaatgaggctgttacatttcttttttttttttttttagacagggtctcactctcttgcccagactggagtgcagtggcacgatctcggctcactgcaacctctgcctcacaggctcaagcaattctcctgcctcagcctcccgagtagctgggattacaggcatgcatcactaccgcccagctaattttatatttttaatacagacagggtttcaccatgttggccaggctggtctcgaactcctgacctaaaatgctccacccacctcggcctcccaagctgctgggattacaggcgtgagccaccgcacctggccaaggctgttaaatttcattcaatccaggcatcatcatggtgtgaccataagtgagcaagtcactttacttctgtgcctcagtttccccacctgtaaaatggggacaatagtagaacctaacgcatgaagttgttgttaggattaaaaagaatagaacaaagcttgacacccagcaagtgctctacaaaaaagtagaagcctgtgaactgaggctggttctgaggttccctggacctgacttaaaagcatatttccagatgtcagacttcttctttttttaagtttggttatttttttttagagatggggtcttgctctgttgcccaagctgatttcaaactcctgggctcaagtggttctcctgcctcagccctgctagtagctgggactataggcacaggccaacataccaagttaaagggtttcgtttgcttgtttttgtttttgttttttttttaaatacttgtcactgatgaagctcagatgaagcctcttttaagtattgttttctaacaatactgttttctaacaaaactgtcacatgttcatttttcttggtgatattttatcttgttattaaatattattctacgtcatttaatgacagcatttaatgtgattataagagtctatcatcaatctacgtacctacctaccatctatctatttatttacagatagggcctcactctgtcatccaggctggagtgcaatggcatgatcatggctcactgcaaccttgacatccttggctcaagtgagtctcccacctaagcctcctgaatagctagggctacaggtgtacaccaccatgcccagctactttttttattttttacagagaaagggtttccctaatgttgcccaagctagtcttgaactcctggcttcaagcgctcctcctgcctcggcctcccaaagtgctaggattacaagcacgagccaccataacccaacctaaataaagttttccagttttgacttttacttctgacaccctttcagtttccctttgttaatggaagaagagagagaatcactgctgcattccaaaatggaaggaaaagagagccaggactttcagttgccagtggcagaaatccaatccacaagtttaagccaacacaaaggaggatttatcagcatgcatcactggagttcagtgatgcctggttccagggactcacacaatgtctacaggacatcttctctcacctctgactggctgtcacgtgtaggtggactctgccccaactagagagccactggtaacttcctcccaacttagcaacgtatcttggttgacaagccccaccaaagtcacatggcggggtgagaatagggaagttccccgaaaagatgggagatagaacattatgacaggcagatcaaaacagaagctgtaccaatccactttagtcagcaatcgactccccaagagaatcttattgaggaacgattctgtgctcagcaccgtctaaggcatgcaggcggaacacagaaggattcatcacaataccttgactttgtaaagcatcacttcccagtgaagaattgactgtgcgtgcattagctcttaacccttagagttcccagtacttagcttaatttcacacatgacaaaaggagacccacctagaccgagtgactcattcaaggtcacacagccaagatgtgactccagatagacattcccccagtccagtgcctcgtccactgctgccgtgtgcaaggggccatgttaaacatgacggtggagagcaagatggcagaggaggagacgcagccttcaaggcctctctatattaacataaatgctccaatctgtcaattcagggtggcatgtgcaggtgccgcttaggtgcctcctcccaaggaagacaaggccctgagagctgaagatgagcaagagtttctagaggaggactttgcaggatgcagggagatggtgaggagggccagacaggccaagcaagggtaggtgcgtggccatttcttacacttcttcagaaatcaatgagaaacctggctgggcacagtggctcacacctgtaatacccagcactttgggaggcgggtggattatctgaggtcaggaatttgagaccagcctgaccaacatggtaaaaccccatccccactaaaaatacaaaaaaaaaaaaaaaaaaaaattagctgggcatagtggcgggcacctgtaatcccagctactcagggtagcttaggcaggagaattgcttgaacccaggaggaggaggttacactgagccaagatcacgccattacactccagcccaggtgacacggcaagcctccgtctcaaaaaaaaaacactgggcgtggtggctcacgcctgtaatcccagcactttgggagcccgaggtaggcagatcacgaggtcaggaattcaagaccagcctggccaagagaccagcctggccaatatggtgaaaccccatctctactaaaaatacaaaaattagccgggtgtggtggcgggtgcctgtaacccagctacttgggaggctgaggcaggagaattgcttgtacccagggggcacaggttgcagtgagctgagatcatgccactgcactccagcctgggtgacagagtgagactctttgactcacaaaaaaaaaaaaaaaaagaaatcaatgagaaacctgaagcctgactggctggaacagaaggaatccgtaagaaatgagtagaagaataaaataataatgttttttaaattagtattgttcttttaaattatttacatgtattaaatcattcatttacttttcctattttatgaaataagtcccactatcatgcccattttacagatgaggaaattgatgtaccaaaaggtttgagcaacttcctgcaggtcagagtgaccaagcaggccaggtgaggtggctcatgcctgtaatcccagcattttgggaggccaagatgggaggatcacttgaggcctggagttcaagaccggcctgggcaacataaaaagattcatctctataaaaacaacaagttttaaaatgtaatttagctgggtgtggtggtatgcacctgtagtcccagctacttggaaggttgaggcaggaggactgcttgagcccaggagtttgaggtaataaacacaataataatgtaatctggatctataattccaaataatttcatcatgggacatggtagagaaaagatagaaaggaaagtaaaaatatgctgagactcttgcctttttggcaaatagaatataaatgctggttaactgtagtctttgattaaaatatatattaaaatatacatattaaaaattcacacaggccaaactgggtctgatggctcatgcctgtaatccagacagtttgggaggccgaggcaggaggatcacttgagctcaggagtttaagaccagcctgggcaacatagagagaccttgtctctacaagaaataaaattaaaaatttagccaggcatggtagcaaacatctgtggtctcagctactcaggaggccaaggtgggaggattgcttgaacccaggaggtcgagactgcagttagcagtgatcatgccactgcactccagcttagatgacagggtgaggccttgtctcaagaaaaacaaaaaaaaaaaattcacaggccaggcatagtggctgacgcttgtaatcccatcactttgggaggctgaggccagaggatcacttgaggccaggagtttgagaccagccagggcagtatagtgagactgccgcccaaccgcccatctctatttttcaaaaagaaagaaagaaaaacagagtgactgagcagagattcaaaactcagtccaaacccactggtttccctgtgctcttaacaactgtatcatgctgtctatgggtgatgctccccagccagctagaaaacaccttcactataggtgaaaagtggtgctcactgcactgtgttcaggaaaagtgtgtcctggagaaacgcttcataaaggtggagctaccattaccccaatccccaaccccaggctacacacacacacacacacacacacacacacacacacacacacaaaacccatgtccacagtctgcatgggaacctccatccctaaatcctactaaaccaataactctttttttttttttgagacaaagtctcactcttgtcccccagtctggagtgcagtggcacgatctcggctcactgcgacctccgcctcccgggttcaagcgattctcctgtctcagcctcccgagtacctgggattacaggtgcgtaccaacacacccagctaattttttgtattttaagtagagatggggtttcaccatgttggccaggctggtctcgaactcctgacctcaggtgatccacccatctcggcctcccaaagtgctgggattacaggtgtgagccaccgtgcccggccaccaataactctttttaagacaagaaatattaaagtaaaaacaattcctctccctccacttcccttctcccaagactcttccttctgatagccatgttttcaggctcacccccagctctgccctattcagaaaccaaaggtcctcataaaagtatttgtaataatgtgtgaatgactcgtgagcttcaaataactgtctctgcagcaaatggccagcctccaaatagaagctagttcaagccagtttccttggctcatttcccaccgctatgtcagggatcaatttagaccatggcctccctcccattttctcttccctggcggtaccattcttctggtcctcccactcccatcccaaaactggtccactcagtcctctcctgttcagaggcagccttcatgacagtgtcggagaccctaagggttaaatatacagcagtggtttaaagttttacctgtatttactcatttgatccttaaaataaccctaagagacatgtattataatggtcctatttccagatgagaaatctgagatacagaaaggttatgtaatctgcccagggactcacagctagtaagtagtacagctggcattgacaccccgcactctctgaaccactatgccacacaggcatggatgagcaaccctcaccaagagtcaggttcgaagggaatacattctcttccaaccatgcaactgacttccttacttgttccattgccccagcctagagacgagattctctaactccgacctagcttctttcccaactctgactttttcttcttgctccacccatccttagctccgccacaatgtccctctctttccatcacttttttggtccttgataatatttccttcgtaagcagatttctccaaacctctaccctggggagcccattctggcattccacctcctaaacccatgttcctgcaaagtgtctctgttgtcctagccctccatgccacagccatgggtgcccttcgcctgtttcttgactcaagccaggcaggaggaggatctttatgaacaagatcccccaccccatatgtctgcatttaatttcagatcagttcctaggccaaagctctcttccaaactcgtcaagagaagttttaaatatattctcccagagcaaataattttgtgttttaacatgggacaaagctctagaaacatctctgggctggtgactctccacttgcctgtcgggagctagctttggcccttctcctgcagctcctgcaccagaaggctgacccacagggactccagggaccctcgcaccctctggctacagtgaaagacaatttggccactgaaagtcataggtaggagatgaaggttcatgaggaaagcgaggttggggtattttcaccagttccctcctagcaggctgcaggctgcaggctggggttgggagtagcagtggcttctttagagcagtcggccccctcctgctgcaggcctccctcccttttcccctctctgggcgtgcttccccatcctctaccctgctcaagcctctataaacagcccctccttcaaactccccactgccttcccaatcaagatccccctccaggcaccctcaatagtggagttcagacacagccactgaggacaagctctctgcaagccctggacaccaaagtattttggtgaccacttcctcctaaccaggccttggtcggtggctccttcacaaaatgacatctgagaagaaacagaaagccaaatgaggatgtgggtggccctgctcctccccggacacagacccatgcatcatgacaaggccacacatgcccagtcacaggatttgacacatgggacccctgggagaaggaggaaacacccacggcttacaaacccgcagcaaacccagagtcctcagcctaggaaaggggctggggacagggcctgacaccctgaagtgcaaggcctgccaaccttggagctgacgaggggaataatttttttaaagatccattactgtcaactgcccccgggaacacccttctttgcaccaactcccctgcctttcaatatgaagacaagtctgacgcctacgtggggaactcaaagtcacacttcctctggcagccgttggtcaaaccgctttataaatctgctaatgattttgtgttatcctgctagactgacactcgttggaaaaaaaagttacataactggaaatgattagaagataaggctttgagcatcatgcttggaaatttcactgctctgcccaattttgggctgagttttaacaaaccagcatttcctggctcctgacactgggaagccttgtaggtgtgagaatctgcttccagttaatagtagacactttggaaccaggtttgtcacatgaatatacccttggtcctcccgtcagtcaactggactcttcaccctccccgcaaaaaatttaaaagccacccttagacatatcacccttaggcatatcacccttagacacacacaatttcacacacatgtgaaacccagatggccagtaagcatataggtactcgtaggctggacatggtggtatccacctgcagtcccagctactctaggaggctgggatgggaggattgcttgagcccaggagattgaggttccagtgagctatgatcgtaccactgcgctccagcctaggcaacagaacaaaatcctgttattttattttatttttattttttgagacggagtctcgctctgtcacccaggctggagtgcagcggcacaatctcggctcactgcaagctctgcctcccaggttgatgccatcctcctgcctcagcctccctagtagctgggtctacaggcgtccgccaccacacctggctaatttttttgtatttttttagtagagacggggtttcaccgtgttagccaggatggtctcgatctcctgaccttgtgatccacccacctcggcctcccaaagcgctgggattacaggcgtgagccaccgcacccggccaatcctgttttttctttttttggtaaaaaaaaaaaaaaaaaaaaaaaacaaggccaggtgcagggggctcgcatctgtaatcccaacactttgggaggccgaggtaggagagtcacttgaggccaggagttcaagaccagcctgggtaacatagcaagatcccacctctataaaaagaaaaataaaaaaagatatgtgcattacactgtatgtaagttaatgctctgtatactgaactccttagaatgaagtatactgctgttctcaacttactttgaaatgtttccaaaaaaatacgattgatggaaggatagaaggttagatatgcaataaaacaagtataagaaaatgttaatggcggaatctgatgatgggtatataagtgtgcactgtaattcttgcaactcttcaaatttttcataataaaattctgaaaaattgctaattaaaaaggtaaagaggccaagcacagtggggcacacctgtaatctcagcaccttgggaggccaaggtgggaggatcatttgagctgaggagttcaagatcagcctgggcaacatggtgaaacctcatctcttctaaaaaatacaaaatattagctgggcatggtggcatgcacatgtagtcccagatactcgggaggctgaggtgagaggatcatcacctgagcccaggaagtggaggctgcagtgagccaagatcacaccactgcactccagcgtggacaacagagtgagacactgtctctaaaacatatatatatatatatatatatatatatatattaaagataacacacacgcacaatgtgagacccctacacgttcacccaaatgactaaaatctgtaaaaccagcaatggcacacacagacaaggatgtagaactatgagaagtcacagacagtgccagtgggagtggaacactatttggtagtatttcccaagagtaaacatatgatacacatattctatgacctagcaatcctacccctaggtgaatacccaacacaaatgagagctttcgtccaccaaaaacatgtacgagaatgttcaaggtagcactgttcataatagtatgaaagaacccaaagatccaagagtaggataaataattgatggtgtatttattcatagggtgacacactacacagcaatgagaatgaactactgccacccataatataggtgaatctcacaaacaaggtgttaagtgagaaaagccagatgcaccccccccaacctccatcaccaaaaagaataacttctctatgctcagtttatgtaaaatttaaaaccaagcaaaattattacacaatctagaagtcaagatcggggtcacctttggaagagagtactgacttggagagaaggtttcttaggtcctgggtaagttccgtgtctgacgtagatgctcattacaagagtgttcccagtttatgaaaacgcatcaaactatacacatgaagtgtgacctttttttttttttttttgagacagtgtctcactctgtcgcccaggctgaagtgcagtggcacgatcttggctccctgcaacctctgcctcccaggctcaagtgatcctcccacctcagtctcctgagtagctgggactacaggtgcatgccaccacacctagctaatttttttgtagagacagggtttccccatattgcccaggctggtcttgaactcctgagctcaagtaatccaaccacctcagcctcctgagtagctggcactacaggtgcgtgccaccacacctagctaatttcttgtagggacagggtttccccatattgcccaggctggtcttgaactcctgagctcaagcgatccacccacctcagcctcccaaggtgctgggattacaggcatgagcgaccctgtctggccaggtatgaccgttcttctgtatgtaggttacacttcaacttaaaaaatttacactaaaaattgtattaaaaaaaaaggtggatcttcaagcaattcgtagagatctagggggtatttttaattgtttctctttgattttgtccctatttctactgcccatttaaaacacagatattaaataaaacagttacaggaccatatagagctaaaagcgacttcgaagatcacctagtttaattcctctgttttacagatgttgagagctgaggctgagaaagcttaagagacttgcccaggttacctagccaggaagaagaaaggcacctagagcctgtgaatcccagctccctgtctagtggtctctccacggcataccaaacctctgtaatctcaccatgactgcctgggctcacccttgccaccaggcagatcacatcacaggtgcgcaatatgacattttcctctaactataatatagaaagttaaggaagtatgtgctttgcttgtcgtttatttcagggatgggtctcactatgttgcctaggctgaatagcagtggcttcacacaggcaaaatcataaaacactaaaacctcaaactcctggcctcaagcaatcctcctacctcagcctcccaagtagcgggaactgctggcatgagccaccacacctggtcataatatggctgtttttgacaggatgcagtaagttggaagccatagaaattgaaaccatacacacacacacacacacacacacacacacacacacacagacgaaggcatggcagtatttattggctcatataacttggaagttcaagagtgtctggccttcagttgcagatggatccaagcacttgaacaagggtcgcggctccgttttgtttgtttgtttgcggtttttgtttgttttttgctagcttcattctcaggtgcttcccaagtattaccaaagatggtcatggcagctccaagtttataatcttcctagctttaacaaccccaggggaagaaagcatttctttgccaaactatacagcaaaaggtcctagggagggaagaagctcatgaacccagcttgggtgacatgtccatttctggttcactgtagtgagagggatttaggagaggcctggttctaaccaaactcaaaccagctccaaccaatagttcactcattttccaatgaacccactgcatctgtggttccccaaagaaaaatggaagtgtcgttaccagaagaaggagaatcagagacaacagaccacaaatatccactacagtaggtgccatcttgtcctctgactcgagcactgtaacaggattttaccatgtcaacgggaaaggaaggtcgcagactttgaacttgagcttcctgcagactcacattcccacacatttcagctgactgctcaacagttaatcttgacagatctcagttgttccactcagtcattaactattacatttaaatcaaatatgccctccagcccaagccaaaaaacatacaatgatggatgatgaagccaaatgcaaatgtccagttgccaatctgccttacaaaaacgccttcccaggccgggtgcggtggctcatgcgtgtaatcccagcattttgggaggccgaggcgggcggatcatgaggtcaggagatcgagaccatcctggttaacgcggtgaaaccccgtctctactaaaaaacatacaaaaaattagccaggcgtggtggcgggcgcctgtatttccagctactcaggaggctgaggcaggagaatggcgtgaacccgggaggcggagcctgcagtgagccgagattgtgccactgcactccagcctgggcgacagagcaagactccatctcaaaaaaaaaaaaaaaaaaaaaatcgccttcccagaatgctggcagaacccttccgaaggctcccagtctgaaggtgctaatatcgcccaggcacatgctggtccctctgagataaactgaaagcagtgacttggcttgggattgtccctgctctgacagcccggcctgaagaagcagcgctgcccagtgtaagaatcacacagtctgtgctgagaagctgggcgggcttatttcagggggaaaaacatcacactgaatcctctctctctaggagggagctgtatattttatgaatggtgtgaaccactcctggatgttacttcctgaatttatttaaagaatttaatgtatccttcaagtttcctgggtcccccctcccactcattcttgacaagcactctgggggagcttgtatcttttgatttttttaaagaaggaaaaaaataccaagggattgccgaagtcccagtttgctccacgagtcactttttaaaagtttgatcttttcatgtcactggctatttactgtgttaagtttccagagatgtattaagtgagaaaaaacagccacatctgatcagtccatatttttctatgaatcaataacttgtcataaaagaagagcagaaattagttgcctattaaaaatgttcaaatgctaagctaaataagcccatcacacgaggggaagtatatgattccaattatatgaggtccctagtatagtcaaattcatagagatagaaaggacaatggagttaccaggggctggcggggagagggaatggggagtgactgtttactgggttcagagtttcagttttgcaaaatgaaaaaggctctggggctaaatcatggtgaaggctgtacaacaatgtgatgtgcttaatactgaactatagacttccaatggttaagatggtaaattttgttatatgtgatttatcatagtttaaaaaataaatgtaaaaaggacaacaaaaaaatattttagaaacaggccagacacgatggctcagaaaccctgtctctacaaagaaaaaaaaattatttttctttgtagagactgggtcttactctgtcacccaggctggactgcagtcgcgtgatctcggctcactgcaacctctgcctcccgggttcgagctattctcctgcctcagcctcctgaggagctgggattacaggcatgcgccaacacgcccgctaatttttgtatttttttagtagagacggggtgcgggggagtggtttcaccatgttggccaggctggttttggaactcctgacctccagtgatccgcttgcctcggcctcccaaagtgttgggattacaggcacgagccaccaggctgggccaaaaaatttttaatttaaaaaaaaaaaaaagaaagggaaacatagattggaataagatttaaagaaatcaaaatatctggctacaaaaatgcttgagagagaaatacagattaaagttgaaagaaataaaaaggcatctaacatattttaaattagtacctcctgaatattgtctgttctttatcactcctgcatcttacctcagctcttccacctgggttgggggatagggccatactttgagtgctgacaagctcttggttccaatccatccttggcattcccattctcccagcaagcccccaagactttccccatggggcggctttaccctgagggttagagctcatgttgagttacagagacctgggatacatacctctttctatctgggtgcccttaggtcagttactccagtcctcacctgtcaaatgaacaaattcaaagcactttgctcatggagtgaggattacattagagaacgcagataacgtgctcacttattagcacactgtctggtgcaaagaaaccgcttgggacatgacagctgtcattaacaatcccccaggctcccatgaggccccagctcagatttctcagtttctcacctttgactgccccttacagtcacctggggagcttcacctggtctgacgtcatcagtctggctgtggtctgggcctccctgccccgttaattttgcactgtgcagccaggattaggaatatggccatggactgggcgcggtggctcacgtctataatcccagcactttgggaggccgaggcgggcagatcacaaggtcaagagatcgagaccatccctggcaaacgtggtgaaaccccatttctactaaaaatacaaaaattagcggggcttggtggtgcgcgcttgtagtcccagctactcaggaggctgaggcaggagaatcgcttgaacccgggaggcagaggttgcagtgagccgagttcacgccactgcactccagcctagcgacaaagtgagactctgtctcaaaaaaaaaaaaaaagaaatatggccatgactggactttctcttcagagaaaattgtcctagaaaaggtttaactagccaggtgtggtggtgtgaacctatagtccaagctactagggaggctgagcaggaggaggactgcttgagcctaggagttcaaggtggcagtgagccatgatcatacctgtgaatagccgctgcactccaatttgggcaacatagcaaaacctcatctctctttaaaaatgaaaaaaaaaagaaaagaaaaagaagccagacataatggctcacacctataatctcagcactttgggagactgaagcagaaggattgcttgagtccaggagttcaagacaagactgggcaacatggtgagatcctgtctctaaaaataataatgaaaaaaggaaaaaaaaaaaaaaaaaaggctgggcgcagtggctcacgcctgtaatcccagcactgtgggaggccaaggcaggcggatcacctgaggtcaggagttcgagaccagcctggccaacatggtgaaacctcgtctctactaaaaatacaaaaaattagctgggcgtggtggcgagcgcctgtagtcccagcactttgggaagctgaggcaggcggatcacaaggtcaggagatcgagatcatcctggctaacacagtgaaaccccgtctctactaaaaaatacaaaaaaaaaaaaaatagctgggtgtggtggcgggtgcctgtagtcccagctactcgggaccctgaggcaggagaatgacgtgaacccgggaggcagagcttgcagtgagcagaaatcacaccactgcactccagcctgtgcgacagagcgagattccttctcaaaaaaaaaaaaaaaaaaaagaaaacaaaagaaaagtttaactcttcatgccctagagatgtaccatgatttcatcttgctgcttctcaaacagaaaaggagcctagcacatgtgctgctatgggagcttttgtttcaacttgactaaggagttcttgtggcaccagcttggtgccctcatcgatctctacctcctcttctttacttagcaatgccttttatgcatcaatttctacagattgctcattaggcaggcaagcttcgtccaatggttgaaaaacattggcttttgccaagagtgtctttaaaaagtcaagcctttcttttccctctggacattttaaaataaaactgcacccccaaagtaaatgtaagcagaggacccactgcttgcatttttacaccatacttacccctcctatatagaggctcccctactccagcctcccaccctgcagctcccaagggggcatgagacttgaggctcccctggaggaaagccagtggttctcaggatctggaaacgggacacttgtgtgcactgattcagacatcctttcaccttgccccatccaaaggcaacacccagagggtcccacccaggcctcaggatgcctccctattacacaggaaggtcattctgtccttggtcggcctcgcagaggtctcagagcaaaaggcaccaggaacccaggactcctggctttctttttctttttcttttttttttttttctttttcttttgttagagacaaggtctcactctgtcatccaggctgaagggcagtggggcaatcctagctcactgcagcctcaagctcctgagcttcaagagatcctcctgcctcagcctcccaagtggctgggactacaggcacacatcaccatgcccagctaattttttaatttttagtagagacagggtctcactacgttgcccaggctggtctcgaactcctggcctaagcaatcctaccacttcagcctcccaaagtggtgagattgcaggcgtgagtcaccacaccaggtgactttccacaccagctcctttccaggggatgggggccccaagggacctccttcaactcactcccaaggagaactccaatttgataaacaggcatcagagtttgcaaataccaagttaggaaaatatccttcactttctctagttttcttcctttagcttttcaatgaaatatgtattgatgctttccttttataatgtattacattcttctgaccacagaaaatccaaacaagaaactaaaccatcattaacctctcaatgaatcttcctccagactttcttttatgtgcacacacacattttgtcgttgttggttttacaaatttggaattttgttatacatggtattttgcagcctttacttactatgaactaattttttaagtaaaaattttccctattctgcttagtcagtgaaaatacaagatgataaaaacaatttcaagcactcttgtgtttgcaaaataaggaactcataactgatttaaaaagaccagcatattgataaagccaggacctacgtttccatgagctaggccttgggacagcccccgcaggcacattcgatcaaaggctccagagatccccaaaagtctatcacttgtcctttcacgagctgatgggtggagaccctgctctgggacttcactctgccactacctgccatgtggccttctagttatttctaacttgactaaaccaatctactatttccatttgtcttttttttttttttttttttttttttttttgagacagagtttcactctcgttgcccaggctggagtgcaatggtgtgatctcggctcaccgcaacctccaccgcctgggttcaagcgatcctcctgcctcagcctcccgagtagctgggattacaggcatgcaccaccacgcccggctaattttgtgtttttagtagagacagggtttctccatgttggtcaggctgttctcgaactcctgacctcaggtgatccatccgcctcccagagtgctgggattacaggcatgagccaccacgcccagcctccgcttgtctatttctaacttgtttaaagttatatctgtaaacttcggttttctcatagctagagtaggacatgaaaaaaatataaacctcacgtgggtgtcaaaaagattaaggagagaatgggctgggctgtaagggccggttactgagcctggggtgagatggtggcttggctcatatccccttcgtaagatttcaacctgtttagagggcattggccctataaccaagcatgtcatcttcttctgccacctttgagaagagtcatcgaacacaggcacttgtgcaaacattgcgaaggtcttttttttctttttttttctgtgtctttttttagagacagggtctcaatatgttttgttttgagacaaggtctcgctctgtcacccaggctggagtgcagcggcacaatcacagcccacaggagccgacaccttctgggctcaggtgatcctcccacctgggcctcccgagtagctgggactacaggcatgcaccaccatgcctggctgacatttgtattttttgtagagacgggattttgtcatgttgcgcaggctggtcttgaactcctgggctcaagccacctgcccacctcagcctcccagagtgctgggattacaggtgtgagcctctgcacctggcctctcactacatcatgttgcccaggttgatggactctaacttctgggctcaaggtactcccacctctcagcttccaagcagctgggattacaggctcaattctttgccatggtacttttaatagcaaaaagaaaaaattagaagcactttaaatatccatcaactaaggaacggaaaataaagtatgctacatccatactatagaataccacacagtttttataaataaccactgatgtatatgtgctaacaaaaaaaaataacttcaagatacattatcaagtgagaaaaaaaagaagttaagaaataatagcttggttttctttatttaaaagaactaaacccacaaatcatcagagtatctttccacagaggcctagggaagtagttgaaggtggctttagaataattctgggtttttcaaccttttttcattactgccctctctaaggagccttttaagatatttctttcctaatcactcccccactaccatgaaattttaataccacagtcaggctgtatgtctgtttacgtactgtggaccgctggagagccacaaaccgctgtaggccctaggatgttgttagcacctcagaacccatttcttccccctgcagggtgatattgcccctagtgaggatgtatggtctaatttgtatattaattgtgtggttaaaaaattaataattaggctgggcacggtggctcatgcctgtaatcccagcactttgggaggctgaggcgggcggatcacaaggtcaggagtttgagaccagcctggccaacatggtgaaacaccatctctactaaaaatacaaaattagccaggcatggtggcatgcacctgtaatcccagctacttgggaggctgagacaggagaatcacttgaacatgggaggcagagcttgcagtgagccgagatcacgccactgcactccagcgtgggcgacagagtgagactccatctcaaaaaaaaaaaaaaaattagtaattaggccaggtgcagtggctcacgcctgtaatccagcactttgggaggccgaggcaggcagatcacaatgtcaggagtttgagatcagcctggccaacatggtgaaaccctgtctctactaaaaatacaaaatagccaggcatggtggcgcgcacctgtaatccccgctactctgaagcaggagaatcacttgaacccaggaggcagaagttgcagtgagccaagatcatgtcattgcactccagcctgggcaacaagagcaagacttcgactcaaaaaaaaaaattaattaataattttaaaagttcacatttacactcagcacaatgtaaaaccttgtagacagtacctccttccctaaaacttcttgtgggttaagcctgccagtgaagtctgggtggggttacggacaggcaaacacagccatgctacagtttatgctgtttgtaatgaaacagatgctaacaacaccaggaagggtgcgtcatccctgaggctttgaccatatctcagatggtccctgatggttttccattccttgagagctgcagataaggtcaatgtcccgatgactccatggctgccttcactgaacccagggagaactgtctggtttcctggttttccgcccactctttggttgctccttctcctttacagttggcttgctctgcccagtcctcttaatttggggtgcctccaggccccatccccagacctcttctccatccaccccactccttaggtgatctcatccagtacagcggcttgaagactatctacgccataacgacttcaaatttatacctaccttgaattaagagtcctctttccaaatgcctactcactatcattacttgaacatatataggaatctcaaacttaactcttgatttcctccccaaacctgctgcttccgttcctcaccttctcatttcaaaccagctccttcctcccatttgcttatgccaaaaaccttgaaactcgctttgagttctctctcaaaccttatacgtgcaacccattaccaaatcccattggtctcgctctcaaaatacatccaaaatccagtggtgacagccatgtcacagccagcatcagctcttgcttatattactgcaataaccaccttacttgtctccctccttctaccctctgctcccccctccatccccccatcattcattcccaagagagcagcagagtgatccttgtaaacatccagctggctcaagtcactcctctgctcaatggctcccctgacactcagggtaaatgtcagatccttgtgagggtctcaaaagccctcgtgctttggccccacccacccctcagtctggtcacctctctgtccccatctccaacactccccacaccacacacactcactctgccccagccacactgacctccttgctgttccctgaccactccaggaatgctctggcctcagggcctttgcacatgctgttctgttttctggctggaatgctcttctctcagcaatccacgtgcttactccatcgtatcttccagggctttgcacagatgccctctcctaatgagaccttctctgcccatcccatttaaaatgacacattttctagatcaccatgcagtttgcttagttttccttgctatctgtcacccctaactaaaatgtaaactctataaagtcaggatgtctgtggttttactactactacatctcctactttccaggttgtgccctgcacacggctggcactgaacgagcgtttgttcagtgaatgagccccgtatcttgttaatctgctgaaaggttccaatgagaaagaaagtggccttttaaacttacatcttctgcccagcagctctgtcacctcggaggtggtctctgagcttagaagtatccctctgccacacataaataccatcacagatccctgaacaactcaaaggccagctggcactttctgtggctgagccagcgaaccactgggatcaattgtcttctaagctcagcaatttgcctaagtcccagccaagggcaaaagtcctcctaactcccaggcaccatttctctctctgtagcttcacttgagccgcaaagaatccaggatccctcaagctctgagttccattcatggaaaatcctaaaacttccttcatcccttcagtcagaatcttttcctcttttggtttggaagaaacccagaggtgttaaaactgaacatcttgaccgaatttcctccgggcaagctttccccaagctcgcttactccaacacaccagcccctcctgccagacccagtcagagccagacttttgagtaacttggtccaagcagggctctgacagcgaacccagaaccccattcacagctggctccctgcctgtcaccaagaatagctccttaaatcaggtcttcgggtaacaaatgaggaacacatcaatttagcaggaaatcggcttcccttgaagcgtctctgaagtttgttgagacaaaaggaatctacagtgcttgagtaataggaaagaccacctgcaacttttacagaacttcttttggacttgaaaattctaagacgctagggggaagaaatctcgaaaatgaacaagatccaaatgcataaggattcatttcccatctccctaaataatcacagccacatgcttcttatctgccataaaaaccaggcagtccgtgtaagggacgggtgaagcagtgaagaacgctggtcctaagcagtgttgaaacctctgattggttgtgtgtcctgagcaaattctttgacctctctgagcctttatctgagaaatggaatccacctcgccaggctgttgataagattacatgagaaatcctgcatgaaagccctctgtaaccgctataggactaaacaagtgacgtttcaacacacacaggaaatgccacttaagttcagaactctctgaggggcaccaggagcaagcacaaaaataaaagactgtcatcacttttgtcttcaagaagcttcaagttcagctgggaaaacagcacacacaggacagcggatgatctagcattcgcaaaagcaacatactaagaaaagcatacacctccatctgctgctttcccctaagtgtccctcgggtctgcttgtttggattctaatatctgcctaactacccatcaatctggctacttcctggactgcaaaagacctcaaagctatgtgtaaaagaagtctctaaatctaagccagataggatggcctgccatggcagccctcattccactcctcaggtccagtcctggttgacttcacctcatcacccaccagccagtgcagctaacctccttcctctgccgcatgtccggccctgcccaaggattccccagggggcagccaatcatcttgttcacctccagcacagcactgtgcataacactctgtattgctctcaactttgcccccaggccagctgaaagcagaggaaagaagaaaggaaaacagaattcaaatggagcaattagcaaaaggagaaatgaggaagcagattaaaaaaaaagaagaagaaaaaaaaagaaacagaaagggagacaatcaaagaaaaaatgaggaacatacagaactatcacttgacatctgactttatagcttaggaagggcttaacctcacattctgtggcttgcgcctcttacaacattctgcagggctgagtaagcaaggcagggaattttacacccatttaggaaatgagcaaactaaggcttgacagactttaatgaagcgctttgtagccagagcccctcactgcctaccttcttatttctcaagtgccttttccattgccagtaacccatgcagtctcaacaaaagactaaagattcagcatctggaggcagaactgaagaccagaaaaagaagtggatggtgttattcacaacagccaaaacatgggaactagccaagtgtccatcaactgatggatggataaacaaatgtggtatatccatgcaatggagtattattcagtcatgaaaagcaatgaagtactgatacacgtcactacgcaaatgaaccctgaagacatcatgtcaacggaaataaaccaaatacgaagtccacccattctgattccatttctgtgaaacacctagaataggcagatgcatagaaccagaaaacagatgagtggtcgcctgatgctgggggcgggcgaagggaggagaatggggagtggctgcttaatgagtatgggttactttcgggatgatgaaacttctggaactggataatggtggtggctgtataacactgtgaatgtaccaaatgccactgaacattaaaatggtgaatttcatgttatgtgaattttaacacaactttttttaaaagtagaaggggaggcggggaagagggagagaaaaaaaatgaagagaaggaggaatgattcctaggtaagtaatgagtttcccgaaatcagggacccgaggagctctgaggtataaaaagagaccctctctcggccaggcgcggtggctcacgcctataattccagcactttggtaggcagagatgggcggatcacaaggtcaggagatcaagaccatcctggctaacacggtgaaaccccgtctctactaaaaatacaaaaaattagccgggtgtggcagcgggtgccagtagtcccagctactggggaggctgaggcaagagaatggcgtgaatgcgggagggggagcttgtagtgagccgagatcgtgccactgcactgcagcctgggggacagagctagactccgtctcaaaaaaaaaagaaaaaaaaagagaccctctctccttttatactgaggaggtaacataatgctgggtttgcccttcatgggggtgggaggtggctgcagacccaaagaaccagcagcagcagcctggaaagggaacagagccatgagcacagggagacggtggagggatgaagctgacatcttcacaggaaaaccagctgatctctccctgaagatctccttggtgtgtactcacctgtcctttatactggctgaactgttcattcccacatatgaataagtgaataacatgagtaagtgcccaaccctgggccaggcactgtcataggcgtttcaggacactaatgatggaatccctggcctcattaagcaaaccctctggagggtgacaacgttcaaactcataggctgctaggacttagtgtaatatagtctgtggctcaattcacccagtgtaaacaaaagctaataaaggaatctttcttctctgatttttaacacatgttaatcacatttggggactgagtagagattagagggatataggggatgcagtctgtagaacaaacagcaactcaccttgcagggtgagcactaaacagagacctggatgcagaaaaccagctattttaattaaaaattctggccaggcgcggtggctcacatctataatcccagcactctgggaggccgagacgggcggatcacgaggtcaggagatggagaccatcctggctaacatggtgaaaccccgtctctactaaaaatacaaaaaattagccgggcgcagtggcgggcgcctgtagtcccagctactcgggaggccgaggcaggagaatggcgtgaacccaggaggcggagcttgcagtgagctgagatcgcaccactgcactccagcctgggcggcagagcgagactccgtatcaaaaaaaataattaaaaaaaataaaaaacaattctggattgaagcccagagtgaggaatttgacttcaggccccaggttcagacagaattcttccaaaagacacgtgccagtgccttcacgggctttgacctgatgcagctctgccctcatgcagctcacattcctttctctgagacagggtctcactctgtcacccaggctggagtgcagtggcacaatcacagctcactgcagcctcggcctcctggactcaagcgatactcccacattagacttccgagtagctgggaccacacgtgcatgccaccacgcctggctaattttttattttctatagagatgggggtctcactatgttgcccaggctggtctcgaaatcctgggctcaagtgatgctcctgcctcggcctcccaaagtgttgggattatgggcacgagccaccacgcgcggcctggagttcacattctaatgataataaggtaaagaagtgaactatataacccttcagctaggaatacatgttagtaagaaaaatgggacaagcaaactgtccctaggtccctatgttttttcaaggttttgatcccatgtggaactatgtaaataagttgcctacccaagcccagggtaaggggcttgtgtgagtttgctggggctgccacaaaaaagaatcatagactgggtggcttaaaccactgaaatttatttcctcacagttctagaagctgggaatccaagctcaaggttgcttgtaaggcttctccccactggcttacaaacagccgtcttctccctatgtcttcacacggttttccctctgtgtgtatctgtgtcctcatttccctttcttaaaaggacaccagtcatacaggatgagggcccaccctaatgaccgcattttatttagttagttagttagttagttagttattttccttgacctacaacagtgtggtcaaaaattctttttctttttatttgtactttgtagagccaaggtctcaccatgttgcccaggcttgtcttcaactcctggccttaagtgatcctcctgtcttggcctcccaaagggttaggattacaggcatgagctactacagctggccatgcattttaacttacctctttaaagactctttctccacatgcagtcacattctgaggtactaggggttgggacttcaaatacgagtggggagtgggtccaaactcagcccatggtattcttgagcactcccacagccctgactgtcccctggggcccctcactgtgctgggcacatccccgttatcactcggtctggttccccacggacaatgaaccctctgatcctagggacccctgagtcctgtccactccatctcattctcggctatatcccagggttgagaacacacctcgagccttagaggggcttaactgaaggcagggaaggatgaaggaggcaacagagctcttactgcaaatgattaaagcttgtctgggccaagaattccaacagctttcctaatcggatagcagggacagggaggaggtcttaggaggaggcctcagaagcaacttcaaagaggccagaggagaaaggatgaccacagcagagaggtgaggggttagaccaagccacctggttgagtcgggacagctgggtgcaagagctggggagagactcccccactctcctccctgcacagcgtctcttagcaccgcttgcattcatcacccgtaaacttcaaatcccgtacacagccaccatcaccttcaaaatccttccagtcatcctcaaaatccttctagtcaccctgaatgggcagcagaatgggtgtcaccacccttttgacagctgaaaaaactgaaggtcagagatcttacatgaacattgcaaggccaaagagccaataactctgtggaaggggtgttggaaggtaccgtagttaaaacccagggccctcagctacacccagctgtccctgcagcagccctactgagaaggagatgaggagagaggaccactccaagcatccagctgcctttcacttgccaatcctgggagtcctggcctggggctcaatggccttgttctccaggagccagtggccttcccttaatagtcagcactccaagatgacctggctatactccttctaaccttggccgtccgtgaccccaagctggttaagccgtgagccaaaatcagacaagatgtccccagttcttaaggcaagctctccctttatcctctttgattcacccatccagtcatcaaatacttactgagccagacttcagagacaccaagcaccatgccagaccagagtagttacaaaagtttaggaagtggcgttcctggccctgcagagctcagagtgtaatggaggaaacagtcaaataaataaggcatcgcagtcccatgtggttggtgccatcccagcaggagatccccatgcaagccagcagaagaaaggactctgcctgggggagagcaaaggccacacagaggaaggggtccatgggctggatcttgataaaagatcatcattccctcgacagggatgagaagggcctctagacagaagctgcagccgagcaaaggcacagaggtgtcaggttgcttcccgctccccaggagagggaaagtaaggaggctggagaaggagtgaggccaggtgcagtttgtacagggtccatatttgtgcaaggtccagatgaggagtgtcttgacacttcaagcaatggggagccagtggagatcaggtgtggagaggatgctgctgacgccatgtgtggggtccctggctcggtggaaacccaagagatatttactaaggaccaggttaatggagactgtgtctgctcctatggaggtgttaccttctcactgctgccctccagccttctcagatggagtatagcctctaagcatgactgctgctcttctccccagaccacaagccatagaaagccaagtacaggtgactgcatgattatcaatcatgtcagctgcctgtctgcaccgtaaccctttccaacttggctgcatctcacatcagtcctcatttgcaagagacttgcagctgtagctgaatatatatatagtcttgatgatttgcagtgaagcataatttacaccttctactgcttctcagagaaatcatttccccaagactaataataaagcagaccagccacccagagtaacaaagccccccaactacctcaacacgcaattcagaaacaaaccagaacaccggccgcattaggtcagcactggcgccattaggcacctccgagagcaaagctgacaggcagggaaggaatgtcagcatttagcatcacataacactgggttttcaaactgggtcctacagagccggagggattcctggagggagtgatccagagcctgagtcacagtcccctgggagtgtatgtggcagaatgagcagctgctttatccaggcccctgaagcaagcaccagggctgggagatgggggattccaggcaagctcagctcccctgcctctcccattcagcaatgccaagaagtatcgctggcttcttggaccaggacgaagggcttaggccagagatggttctgtggtgcccgtggaatgcttggcaatgccttggcaagtccataccaacatctcccaaactcgccgcccccacccccacactctctgaatgactccacatagaggactctgcatagatgaggaaggagtctggcttcatgtccactccggctattttctcccaggtgaggcagaagaagcccatctgaaattctaaaccctatcaggatctgacagccacgcccaccacagggctccagaaaaccatacacggagcctgtctcatacctctcctgtgaacatccctaaaccccagctcactgtctctcccagcacacattctaatcagcatgcattagtaatctggctagagggacaggcaaatctttgaaagagcttcaccaccaactcaactcccctccctcccccaccacctttttttttttttttttttttttttttttttgctgatgagcaaaaattgcctcctcttttcaaagcaagaagtcatcagaaacaggaagatctctgccctcttccctgtgtgggctgtcacggcagacagcggagggcttttctttgttcgctggttaacagagggaattagagaaaaaaggtgagcagagagagccctacaaccaccaccttggaggatccgattatacggccaggacagacaggtgctggggcacagaaagagctcaaaaactgtagtcgactggctgagagaaccaatgtcccctctgccatgtcacaagacacatcaacttgaaaacatctggccaggcacggtggctcatgcctgtaatcccagcagtttgcaaggctgaggtgggcggatcacctgaggtcgggagttcgagaccagcctgaccaacatggagaaactcggtctctactaaaaatacaaaattagccgggcgtggtggtgcatgcctgtaatcccaactactctggaggctgaggcaggagaatcgcttgaagctgggaggcggatgttgcagtgagccgagatcgatcgttccattgcactccagcctgggcaacatgagtgaaactccatctcaaaaaaaaaaaaattcataggtcctgtgacaccaaatgagaggagagtattttcccttataccaagcagggagatatttcaggagatcttggatgcaatctgttgcagaaaactccgtgtttccaagctggtttatctgtcaccttatctaagattcccctccccttcaatccccttaacctcttaagattcttggtcacattttatcacatgcagggaggatctggataggaggagactgagactatgaacatgaatttttggtttaagtttgtggtccaaatacactataacaaactcagagatccacagaagggctgtgacttccttgggcaaaaatgtcttcaatgacagtgctaaaaccagacaaacagggacctgatggtgctaaaaccagacaaacagaaccaagattgaaactgacttaaggtgacagtggccaggggtcagaaagacaaggtccccacccaaaatggtgaccaggaggttgggaaggacgctccgagacagcaggtttcttttattaataaagaaggcaaatagtaatgaccagcattctgagcaatggatgcaaaatacgtaatatggcagtgaccatcagcaaatactgagaactggtgtcaagctctcagtggagcatttacgtttaggaaaacaattgtaactttcacaacaatcctctgatgtgggccttattattcccacttaaagatacggaaactaatggctgggcgtggtggctcatggctgttatcccagcactctgggaggccaaggcaggtggatcacctgaggtcaggagttcgagaccagactggccaacgtgaggaaaccccatctctattaaaaatacaaaaattagccaggcatggtagtgggtgcctgtaatcccagctacttgggaggctgagacaggagaatcgcttgaacccgagaggcggaggttgcagtgagccaagaccactccagcctggagggacagagcaaaactctgcctcaaaaaaaaaaaaaaaaagctatggaaactgaggtagaagttaaggtaaataatatgcctaaagtctcatacagccagcatgcaaacccaggtctgatcagctctaaacaccacgctcatcaccattgcaccaaactgcctgccaagatgcccacaaatcgagaacacccccatccaaggagtcacccaataatcaaatcaatcccaagggaggccgatttcttcaacgcctgtttttctctccagcacgaaataataatggtttgctgccctatatatacaatgacttcatggaatctgagttatttgccctgcagcagggatgttctatttgagtcacacacactctgttccccaatcaatcttgttacctatcctatgcatgtgtaagatgcctgcatgggatttttattgttttgtatttattttattgtaactccttattgttacttttttccccatgtgaagccaagtaactaccatgggcagcaaactcagaatctggtattcatcggcaccatgaatgtcagcatgagggaactataaccctttgttttcttatcaagtccctaagcctggttgtacaaggacgctaaaggcttaaaagatcagagacccaatccttgagctcaaggattccacaatgtagtgggtggcaacaaaattccaacccagtagggtaagtgttaaggggtctagaataaggatgagggtggcggggggtggggggtggcagtgcgggggtggcggtgggggcacggtggctcacgcctgtaatcccagcactttgggaggccaaggcgggcacatcacgaggtcaggagatcgagaccatcctggctaacacagtgaaaccctgtctctactacagtacaaaaaattagctgggcgtggtggtgcatgcctgtaatcccagctactcgggaggctgaggcaggggaatcgcttgaacccaggaggtggagattgcagtgagctgagattgagccactgcactccagcctgggtgacagagcaagactccacctcaaaaaaaaaaagaatagaatagaatggggatatatctcaatagagctgtcaaacagaaagaaaagggagtaagggtaaagaagaggatgggggaggagggttacttcgaggaacaggaacagcatgcacagggtacagaagcaaaaaaaagcaaagctgtacccaagaatcaggtagttccatgtggttctgataacatcatgcacgtgaataaatagctaaaatgcagctcaggagatagacaggggttgggtcatgaagggcttgtaaacaaggctaaggcatggtatattgtaaaggcaatgaagaacctatgaaaaatgttaaacagcagagttccgtgatcaaactggctacaaaaatcactgcaccatcactctggaggatatgagataggaatttggcaggacttgttttacaagatacaggtcacaaagaccccgttgatcaaacaggatccagtaaaggagccggccaaaacccaccaaaaccaagatggcagccagaggctaccgctggtcatcctcactgctcattatagggtaattataacacattggcatgctaaatgacactcccaccagcgccaggacagtttacaaatgccatggcaatgactggaagttaccctatatggtctgaaaggggaaggaaccctcagttcccagagctccctacccctttcccagaaatctcatgaataatctcccccttgtttagcatataatcaagaaataacagtaagtatagtcagtcaagcagcccatactgctacctaagcggtagccatccttttattcccttacttttggtgtgtgtgacggagtttcacttttgtcacccaggctggagtgcaatggcacgatctcgactcactgcaacctccacctcctgggttcaagcgattctcctgcctcagcctcccgagtagctgggattacaggcgcccaccaccacgctcggctaatttttgcatatttagtagagatggggtttcaccatgttggccaggctgatcttgaactcctgacctcaggtgatccacacacctcggcctcccaaactgctgggattacaggcatgaggcaccgcacccggccttattcccttactttttaataaatttgcttttactttgtcagctaactcttgaattatttcctgtgtgaagccaagaacccatgtggcctcccaggctcagccccaattttggggttcaccctgtgacagatggacatcactagggggataaaatggacagccactcctgttagggcacacggcagaaatccagactaagtctccgacagcaaggacctgagagttccatctaggggctgcaggagacaccggctttgtggtaccgccaccatctgcagtgtacagccctacaacacgggcccaggattagattctgagctccacagcaacactttaaaaagagattttccatccagccccttgaaacaaacctttcctttgccccagcaacaggcaaaaagacaaaaacgaatgcttgagtccttcagcagtctcctgagtttcacctctcccaataaatagccttttcctcattacaaaaagagttttgtgtgggagtgcccaggcagccggaggcccatcaaacccaggtaagaagccattaagactaattagcccagcctgaggagcagcaaccattatgtagcagtttcaaataaactagcaatggccagacgctgcagcttcccttgctttcacttgtaggacctacgccccgaaaaccctcaggaaaatgctataccatcttgtatgcaactccccaagtgttatcccaataccagcaacatcccatgggaatatgctggagatgcagaatctcaggccccaccccagacctactgaatccaaatctgcatttcataagactcacaagtgatttgtgcctcatcgataatgctgcaccagacagtcttgcagtacgacctcagagaggcccttggaaaagggtccccctacttccccaacaccatccgccctgtgtgccccaatgaaactccagttaacaggcagctgtcagcatccaactatgatcaccagagcatacaggaaggtaaactgcacttacagagtgtgtgtgtacaaagtgccaaagctcttctaccaggctctcctgatcctcagaggagccctgggagacttagaaagattctgcaactggctgggcgcggtggctcacgcctgtaatcccagcactttgggaggccgacacgggcggatcacgaggtcaggagatcgagaccatcctggctaacacggtgaaaccccgtctctactaaacaaaatacaaaaaattagccgggcgtggtggcgggtgcctgtagtcccagctacttgggaggctgaggcaggagaatggcgtgaacccaggaggcggagcttgcagtgagctgagatagcgccactgcactccagcctgggcgacagagcgagactccgtctcaggaaaaaaaaaaaaagattctgcaacttgcctgggctctcacacaggtagcaggggctgagctgggatttgtacgcagacctgccaccctcttgccaagcactctgctgcccccacctcccaggggtttctggccgacccttgaacgttgttgtctaagctgtccatactgggagcagctgcagggctcacattccagttcacaaaccaaaccacacaaaacaaccagttatccccttggaactgataaactgtctcaagatgtagagaccatgtccccgttgcatatgtttttcctgacactgttggcatctggcaagaccatccctggctgcctctccatcgtcctggttcatactgcagtccagaccctgccccccagcctttccagcggctgaatcctgcacttcctccttagccaggctcctggcattggccccaggaaagcctccctgaggcccacctccacctcatgatcaaggaaactcctctggtcaaacaggaacaccagccaccatatctctgtcctcggattaaatatactcacagaggtctaattccaaaacctgtgttctttccatgaccctgggtagcctcatataatccacttttaaagagaaagaatgaaagtaaactaaatccaatctaattccaggatttaacaagtcttgcagacaaactgaaaacccctaagggtattcaaatgccttgctactcaaattgtggccggcagactggaagcagtggcatcacctgggagctggcgggaaatgcagaatcccagtgtggtgtaatatgaaatatatttggtccttgtccccaggtcctgccacatagctcctcaaacccttggaatttcctgataggaatgttgtttgttattcataatgagcccatttgatcacacttcagtggatgctaataaggtgacttagggtgggggccctcagatagcccaggttggagctggtcaccaggaacaagttattagaggattagagggttgggatttttgagccccacctgctgacctccaggaaaaggggggccatgggaggctggagaccaagctctataaaaactctttttttttttttttttgagacggagtgttgctgtgtctcactcaggctggagtgcagtggtgtgatctaggctcactgcaacctccacctcccaggttcaagcaactctcctgtctcagcctcctgagtagctgagactacggcgcgtgccaccacaccaggctcatttgtgtatttttagtagagacggggttttgtatgttggccaggctgttcttgaactcctgacctcaggtgatctaccttcctcggcctcccaaagtgctgagattacaggcatgagccaccctgcccagcctataaaaactcttgaacaagatttgataagcttctgggttgctgaacacatggaggtgctaggagagtccagagagggcatggaagctgcacacccctacccccatatgccctggcattgaacaggcagcccccagcattcaactatgatcactagagcatgcagaaatatgaattccacttatggagtgtgtacaaggtgccaagctcttctcccagcttctcctggccctcagagcaatcctgggaaacttagaaaaattcttcaacttgcagaatgcaccccttcctctggctgttcatctgtatcctttatagtaaaccagtaaacgtgtttccccaagttctgtgagccatcctaggaaattaatcaaacccaagcagggagcagtgggaaacccaatttacagccggtcaatcagaaatataagtgacactacttgacatatgaagtggggcactcttgtgggactgcgctctcagcctgtaggatctgactccaacaccaggtagacaatgtcacaacccaatagaaatataagaggttcagctggtgtccactgaagaacccgcctggtgtgtgggaaaacactcgccacccccaatcaagtcacagaagtgtctggtgctgtgtgagtgtggagaaacaggatggagtgtgagcagagagtttggttttttctttcagattcaggtttccacttcagactactaaatcagtctgcatttttttttttttttttttttttggagacggagtctcgctctgacacccaggctggagtgcagtggcgcattctcggctcactgcaagctccgcctcctggttcacgccattctcctgcctcagcctccagagtagctgggaccacaggtgcccaccatgcccagctaattttttgtatttttttttttaatagagacggggtttcactgcgttagccaggatggtctcgatctcctgatcttgtgatccgcctgcctcggcctcccaaagtgctggcattccaggtgtgagctaccgcgcgtggccagagtctgcattttaacaagagcctcgagtgatatgcacacccattcatgttggagaagcacagatctcacaccatgtatagtgatattgtacagctaggctctgatgtccctacaccagaagccaggccccacgtattcaaaggcttttttttttttttttgagacctagtctcactctgttgcctaggctggagtgcagtggtgcgatctcggtggctcactgtaacctccacctcctgggttcaacgaattctcctccctcagcctcctgagtagctgggattataggcatgtgccaccaagccaggccaatttttttgtatttttagtagggactgggtttcaccacattggccaggctggtctcgaactactgacctcagataatccacccacctcagcctcccaaagtgctgggattacaggcgtgagccaccgtgcccggcccaaagccttctttataatatgaaaatattagactgggttgggtacagtggctcatgcctatactcccaacactttgagaggcagaggcaggaggatcacttgaacccgggaggcagaggttgcagtgagccaggacagtgccactgcactccagcccgagcgacagaacaagattctgtctccaaaaaaaaacagaaaccactttgctgtagcagcactgaattcagtctgagaagcactgctctaggtgcgatgataaaatgctgaaactgaaacagacaggaactggggtgtccccatgagtggttacccatgtggtggtcaacagggccatctacatagatacagcttgctccttttctccttccaaacacacggcaggattgtattttttcactgtcttaaagttaggtgtggctgtgctttagacaataaaataccagcagaagtgtcatgtgtcattcctgggcaaaagctttaagaaccatgtgctgtttgacacagtccctgagcattccacacactgggcgttccatcatcctgggtcctggaggtcttgcggctttggaccaactcacaatagacttacaacatgagcaaaaagcaaatccatgttgctttaccactgagattgctgtggtggcataaagtaacccatcctgacccatatagcacacacccccacaatgctacctttttcagaatatttctgttactcctcattcactgctcaaattcatcattactttaaggtaggacctcttttttagccctgaacggcattacttaactcagttactcgctttgctcatcaaacttcactccggaatcatctgagtttttcttttccacagatttcctcatgtgtttatgcttttatctttttgtaccgtatgctttttggtaagctgccttaaatcctatttgccacaaggtgacagacagacagtcacatgaacagacacaccagacttggctttgaatgaattttggctgtttccaaaaaaaatcaaatccacccctcaaaagacaaagatttgctgttactgaggatatttataagaatgcagtcccgggccagcatgtattccttctacctattcttcccacaaaaggatacttacagaatgtttggtacacacagttcccacttttgaaaagtaattcttttctggacacaccatctctttttgcctcactgtgaggagaaatgtgaactatgctagctccacaaagacatttagcatcattaaccaatatttttattttttaaattcagtttcatcccagcactttgggaggccgaggcaggtggatcatttgaggtcaggagttcgagacctgcctggccaacatggtgaaacccatctccactaaaaatggaaaaattagccaggcatggtggtgggcacctgtaatcccagctactcgggaggcggaggcaggggaattacttgcacccaggagacagaggctgcagtgagccgagatcgcgccactgcactccagcctgggtgacagagcaagactccacctcaagaaaaaaaaaaaatccatttcaatatagttactgaaccccttccgcatgttctgacctgctaagcgcaggtaaacctgattttaactagttccttctggtgtacattgaggttgttgttcatcttgtgctatcagaggctgtgatgtaatatacgctgatatttacagcttgcctgatatatcagatgctccctgagaagaaatttctagaagtggaattgtacagtgccaaatggtccttcaggaagctcaggaccatttccttacaccctgccaataccattttttttttacatatttctgtcttcaagctgttttttaattaaatttgcaattattcaatcactggcgagactaaatagttgaggactttttatatggttttgtgtgtgtgtgtgttcatttgttttaagagacagagtctcacgctttcactcaggctagagtgcagtggtgcagtcttggctcactgcagctttgacctcccgggttcaagcgatcctcccacctgagcctcctgagtagctggggctacaggcatgaaccatcacacccagctaatttttttgtatttatagagaaaaaatttgggtttccccatgttgcccaggctggtcttgaactcctgggctcaaacaatctgcccaccttaacctcccaaagtgctgggattataggcatgagccaccatgcccagcctgtatatgttttattatgaagtgtctatccaagttccttgcccattcttatactgatatgttcctctttgttttgggttttgttgttttaatttataaaagcactttctacattaaggaactttttccaaatttgtatttgccttttacctccttttttttgggaagagatttctagtggcagaataaaggatggacagatggggaaaatacaaaagggaaaaagtgcattacaagtgacctgcaagaagtgagaccccctgaggttcccttactccctccgatcaacacaccagcaagacctgttgacactagctgcaacatacattccaaatccacacacctctcaccatctccacttccaccaccctgctctgagcttcccaactggtctccttgcctcccctccctgttttcttcaaatccattctccaccctgcagtctagaagagctttccagaacgcatccgaagatgccacccacttcaatcaaaccaaaggcttttccactgcatttagaaaatgacccatctccccaggttctatctccttccccggcacacccccaacccctctccccctacttgccactctaaccattctggaatattctggctctcccaggtttatcaaacacactcctctactcagggttatgtacatctgcagtccccctcagcctcaaattattttcccccaaatagtcacatggctggctgggcacagtggctcaagcctgtaatcccagcactttgggaggccaaggagggtggatcacttgaggccaggagttggagaccagcctggccaacatggcaaaaccctatctctactaaaaatacaaaaattagccggctgtggtggcgggtgcctatagtcccaactacttgggaagctgaggcatgaaaatcatttgaacccaggaggtagaggctgcagtgagccgagatcacaccactgcacttcagcctgggcaacagagcaagattccatctcccaaaaaaaaaaaaaagttgaaaacaaatcaaaagaagaataatacttcacggcccatgaaaattataacaaattcaaatttcagtccataaataaagttttattggaacacaggcacgcccattggctttcggattatctctggctgcttttgcactacagcagcagagtggattagttgtgacagagaccatatgggatgctctcactgcttgtcactgcctctggcgcactacagatcacaccgatgcagccgtaactcagttttgcctcatggcccacacagcctaaaatgtttcctggccttttacagaaagatttgccaacgcaagttaagaaggagaaggctttaagaaatgtttctggccgggcgcagtggctcatgcctgtaaccctagcactttgggaggccaaggcgggcggatcatgaggtcaggagtttgagtccagcctgaccagcgtggtgaaaccccatctctattaaaaatacaaaaattagccgggcgtggtggtgcgtgcctgtaatagctactcaggaggctgaggcaggagaatcgcttgaacccaggaggtggaggttgcagtgagccaagatcgtgcctttacactccagcctgagcgacagagcaagactccgtctcaaaaaaaaaaaaaagaaaaaaagaaatgcttctaaggaagaagggaagggacgaggcttgctagcctactgaacaggagaggaaaggtaaggggagagatatcagggaacttggtggacagatggtggtgacattcactaaagtttagagcaggggtgtccaatcttttggcttccctgggccacactgaaagaagaaaaattatattgggcctcacataaaatacactaacgctactatagctgatgagctaaaaaatatatatctcacaaaaaaaaaaaaccctcatgttttaagaaagtttacaaacctaagaacaggcacggtggttcacgcctgtaatcccagcactttgggaggccaaggcaggtggatcacctgaggtgggaagttcaagaccagactgaccaacatggagaaatcccatctctactaaaaatacaaaactagccgggtgtggtggcgcatgcccgtaatcccagctacccaggaggctgaggtaggaggatcgctagaacccaggaggcagaggttacagtgagccgagatcacgccattgtactccagcctgggcaacgagagcggaactccgtctcaaaaaaaaaaaaagaaagtttccaaatttgtgttgggccccattcaaaggccatcctgggccacatgttccacaagcttggtttagaggttgggaacagaaggcagtgaagaggctgggcacggtggctcatgcctgtaatctcagcactttgggaggccaaggtgggaggatcacttgagcccaagagtttgagaccagtctgagaaacatggtgaaaccctgtctctacaaaaaatacaaaaattagccaggcatggtggcaggtgcctatagtccaagctacttggaggatcgtttgagcccaggaggtcaaggcagcagtgagccatgatcatgccactatactccagcctgggcaacagagcaagaccctgtgtcaaaaaaaaaaaaaaaaaaggcagtaaggagaggagagagggctgggcacggtggctcacgcctgtaatcccagcactttgggaggctgaggcgggtgaatcacaaagtcaggagttcgagaccagcctggccaacctggtgaaaccccacctctactaaaaatacaaaaattagccaggcatggtggtggaagcctgtaatcacagctactcaggaggctgaggcaggagaatcacttgaacccaggaggcggaggttgtagtgagccgagatcacgccactgcactccagcctgggcaacaaagcaagactccatctcaaaaaaaaaaaaaaaaaagaggagagagatgatgagtttagttttgacatatgaaatttgagtacctagaggttgaatctgaaaaccagctccaagctcaagaagagtagtagacggagaactaggaagttaaactaaaaacaaattcttaaagatggtagggaagacagaaaacgtgaagaaaggaggtgggtggatcctcttaagactcctcaaaaacttctcacagttcatatacctactgcaactaaactttcacaacgtcacaacatgttctggtcagccaaggaaaagccagagagatctgccagccgccacttcttcttctcgccataggcataaataccaccccagaagcctcgccattgcagggagacagagaaatatactaattttgcatttaagtacagaggaatccctcctgacattttgttagaaagcctgtcatgtgtcgccttgctgctgtgagtaataagacagcacagtcccctgggctggcctgataatagtcaaaataccttacatgtacacaaggtttcctggtttaccaaaaaacattttctttcaccagcgaagtgaggatcagtatccgtgttcacagacaaggtctaccacaccatcagaaaaaagctgggcttttccagactgagaagagtacgtgaaggtcagcctctcattcatgtttctaggtggtaacagacatcagggatccacagagcggtgaacagatgtcagggattcccgccgacttgttgctaagggaacttttgtgaaaatgccctgaatccactcaatccataagccttgctcattgctttaaagtcctgtggggtagccactgaccagtccagcacacaagtgtgacaaaagaggtggttccttctgagctgaggctgacagagtggtgggccaaaggtcattttctaacaccaggagctacaaatactggccacagcccccataccaaggaggagggtgatttagtgaagatgtcagaaagcacgctggtcttttcagtcacaattacccacccctccgagccacaagccctaattgcaccttttgtgaacagagttgatgactgactgaaaaatactagcatgagggacaaggtcacactcattttgggtgattttcatgttgcagaaagaaaggaaaaggctctgtattaaaatcaatttgtgtaatatagcaaacatctattagatgtcagggagctcagatccactatgtctatgaatcatcagcactgaacagccctggcctaaaaaaagctggactggtatgtcaatggcttagtggacaggcccagagccaggcaaatctgatttcaaattccagctgcatcgtttatcatgtggcctttagaaagaaacctctagagtcaaaaaaaaaaaaaaaaaaccctccaaggattgcgatagaggtagaactgccaagtctctgcattttacctccctcttggggttctctctctcatcagtctggcccagcactacctcctcactaatggatcatctgtcccatgtatgttctccctagccttctgagggagctagtctgcaatatggccctcgatgaaccacgcctccctcataaccgcacctgtacccacctcccttccaaattgactctggacagacctgtgactactttcccaatagaatgtggcagaaacgatatgccagttctgggcccagaccttaagagggcctggcaatgtatgcctttgcattcttagaagccagctaccacataactcctgaagagaaaggccatgtggaaaggccctggagaatgaaacactacatggagaaaggcgccacatggaagaacatcaaagcaccagacaggtgagtgaagatgacattttggaggctgcagtctagttgagcctccaagactctgccccagccaccatctgattgcaactgcatgagagacactgagacagaccagcagaagaaccacccagctgagccccgtcaatccacaaaaccatgccagataataagaaattgttgctttgaaacactaaatcttggagtggcttgttacatggcaatagataaaacatcattccttaattatccatagcacagcccactctctcccacagacactccttatcaactcctgcagcacaactgcatgaacccaaaatgggagaacaaagggtagagtgaagaaaatcaagtttaacggtgaccctcagcagccattctagttgtgccagcaaacagtgtcatattctgttagtaacccagaaagaaaggaaaaggctctttttaggaaagagaaaaggtccagattatccagccagatcctggattctaagaataccacctagttcaaagaaagctctattttgtttgcattccaatcccattgtcccccagaattatttcccaaaagctctgggaagttttgtagatgccttacaacattccccaggtccctaatttcttctctccattcaaggaaagtacaggccacaggaattcctggaccctattaaaccctccaaccactgacctgtccagccactgggcttgtcctggtaccatgtctttctctccaaattttccccaggatggagatctaggattctctatccaccttccccaggagctatttctcagccttgatgtaccctagaaagctggtggaaatattcccacatgtggggttcccaggtctatggaggcaatctcaggcctagcttggagctggcagaacatgctcccacagctcctatctctggtctcaggtctcttcctctaccatatctctcaaatgatgttaaaaagacttctcggccgggcacagtggctcacgcctgtaatcccagcactttgggaggccgaggcgggtggatcacaaggtgaggagatcgagaccatgctggctaacacggcgaaacctcacctctactcaaaatacaactgcactccagcctgagcaacagtgcgagactctgtctcaaaaaaaaaaaaaaaaaaaaaaaaagacttcttaattcctgtccctcgtcatagcagaagaaaccctcaggaaagatttttctagttgattttatctaataaccagctgtgggccttggctgtaaggcctattccttttctggaggtaggtgtttccctctgcccatcctttgaagagctgcaccaccccgagtaggaagaacccttgtggccagagtccttgggcctaccagagacctctacacttccctgcctgtgctgaggttttcctggaagctgctctctggaagccaagtatgtgctataccatttccttggagtcttgaccaaagagattgccccaaaaaccaagacctcctccaagctggcctcctcccaagggctagctggccactgggtcagatctggtgactctcttggagttagctcccaactcccctcccccgtgtatgcttcctgcaaaggctgggtctctcggttccccttgcttcatctgaacaaggaagatctccttgggaagtatccagtgtgcacacagtattcagtgcctccctcccctccaccaagatggggtttcctagtatcactctttctatcagggtgaaagttccgctggagtagggagcacattagagatgccatattcatctgtgtacccacaatcccatccctaggccaggaggctagtacagtccatctgtctgtacttgtttctccaacagctgccctggccttctgaactccatgctcccaagcaagctgagtgacagcaccacattggctgacatctcatgaggttcgccatctccagtatctatgggccccctctctagtctcatgagtccagatgctggccagtctacccaccagcctggggacctctgcattctctgagtctgcccttcaggactcaccccatcccaagcaactctgcttgcatgtcctctatctctacctagccttcagccttgaggtccaacttgctcatgtaggaggttcccagatgccaagcacctgacccacatgcccccctgttgaaactgcatctgctttggccctgagaagagtcccacccagtacttaggatacaggactcgggcccactgtgggaagacccccagctggttctgagtaaagtcacactttggggttagcagggaagatcctccaagttgctcctggatgcagctgtcctcgttttagccctagaggttcagcctccccttcgcggtgctgtcaccaacatgctgacctcaggggctgcgcatgccccttttccccatggatccagacccttcgctcacacgctgtttggcatagttgagcccgggctatcatgtttaaaaaaggcacaggcgcagggggtgatactcagtcatctgagctgctaacaaaacacgcaagcattactagttggggagctgacttcgcctctctcatattcagcttgcttgtctataaaatgggggaagtacctcacccttcacagagctgtcagggaactggtgataacgtgcacacactgtgccaagcaggtgctcagaagtattgctcacgcagatggatgcttctgttgcaagttactagtcaggaatggtctgagaggccctgagacaccagagatctcttacctttgtatatgccagaggatgggacagacacacccaaaactgtcccagttgttaattccgcttgtcccctggccctggtccatcgtccctttcccggaagaaaaagcagcactccactcttgctaactaacacctacccagcctcacccctacacaaaacacagctggctcagtccagccagggatgctcctcaccggacagacatccatcagccaaatttccacatcagaatttcctggaaaagggtgaccacccgaagaactcccaaaatacgtatctatcccagggcttcaagctagaaacaaggaggccccttgcttctcatgtaagaagcaatacgttcgctttcttttacatccgaatctcgggaaaggaactggaaaagccagggcagggcacacctgagcctctcctacaagtagggtatctccggattctccagatacagaaccaagagggttcctgcaacatactctgctgacagcccatgaaagctcattccagcagcccctaaactttgctcaaatgctactgatgcctttaggagagattttgttgttctctggacctgaaagcaatctaatgtacttttataaggccaggctcttgctgacaatgttgccacaggatacatcctcaggcggactcaccctgtaaccatttcacttctttctttcttccccccgcccccgatgaattgcactgagcattctcagtcaaaatttgctactttctctgtgaagtaggtcaagagttaaataataaataaattcagcctccatgatttcttccggcagtgttttaccagaatgtttaggaatactgacaccattgaaggtaactgttaatttagtctttacaagaatcctgggggcaggcgggcttctagtaaaggggatgtcctggaaggtcacccccccacacacaaaggactttagaaacttcgggtctcactcaggctgtgactgcgagctcagtgattagaggacagcctgtcacatagacaataaacagccagccgccttgcctcagcaggtcctgtgcagccctggggccaggccagaaccccaggaacaagccactttcgggttctgagccttagcctcggggagctggaccaggggagcaggcagtggcggggggtgctacggcaccccaggatcaagcctgctgagggggctcgggctggtggccagcaggctcggctgaccagcaagtgggtggtcccgaggcggccaggcagcctgacccaaggcagcacgaccgtccacgggtcatcaggctctagactccggggtggagacgcggggctgcgggaccgagtcggtgccactttctcgcacccctgatcctccgtgcctcttcccaagaccgccagacccttcaccggcccctgccactgccgggaacgctcccgcctgctccttaactcacacaggcaacaagttctcgcttcctcagagcagccacggtgtgctccggaggcccggcgcaaggtggaagctccccgcgagtccgcgttgcccacgccccgaggggcgcccgctgccgtcgctgccccccaggagcgtggagctacaggtagcgccggcaagggctgccccccggggcgcccctccgaccgggacgctgcggcatccccggaacgggcaacaggtacgcgagcgcaccgaggaccgcagccccggctcctacagccccggccctcgccccttacctccagcaactgcacgtagctcgccgggaaccagccacggagcccgtcctccttctcgccttcccaccagccgccgtccgggacctgcagcagcgtgatcagctcgcccgcggcgaagcgcagcccctggccgtgccgctccccggagaaggggtacagggtccggcagcgagcgccggacatggccttggcgcccgggttcacagcgcagcctgcattcccgccgagccccacgggctgggcagcggctccgcggggtcccaggcgcccggcgctccgggctcccgcgctctgggcgcgcgccgtctctggggtgcgcgggggtcctcaggcaggcgggggacgcgcgctccgcgccgggaagcagagactcgttggcttcgcagagcgagcggcgacgcccccgggccgggcagctcgcggatcctagctctgggctggggggcggggctcagggggaggagacccaggcgccgcgggctccggagacaacttcccgggaacgcggaacgcgggctgccgccgcgagggctggccggggccggggccgggaccggggccggggccgccctggcgcgcggaaatgcgcagctcccccgggaggtgggacccggagcatcccccgcggcaggactccgcggcgggcggccgtggagaggagctggcggccgggtggccgggcgggggttagctcactggcgagggggcgggccggggcggggccagggcggccacgcccgcggagggctgcgcgctccctcgcagaggggcctgtcactggggagaggggctcccactcgcgcccccaccgccggggaccgcgggaatggaaacgcccctctgttctgtgcctgctttgtaggcctggcggcccgtggcgtgcgggcggcttcttcgaggtgtctgcgagggatcgtttgtggttgtcattgtagtggttgaacctggggttgaacttgtctcaccggaaactgaacaatgggtgaaagacaggtttgaagcctggcgcctgagcccagcagcctggtggcagcgtggcacgctggagggacggaatggagagaagacggggtcggagttgatagaattggaaacagtcgatggggataaatggaggaaaggcgaacggtgagaggaacagcaccaatgcttttacttgcagagggaaggccggcccagggtaccagccctcccgaaatcgagatgggttggctaaagagtctacactcatgtagtcagtcaacaaacattaccaggaggctgccatgttccatgcgatgtgccaggtactacaaacatcatttgggccagtccctgctctccagggaccagtgaacctgagtgctgcagaatgttgaccttgaactgaccgtacagaagtaaaagaaagcttggtttctttgctagtctactccataaaaaattttaaagaaataaaataaagtacattttttagcctgtaaatagctggactcggccaggcgcggtggctcacgcctgtaatcccagcactttgggaggctgaggcgaatggctcacttgaggtcaggagttcaagaccagcctggccaacaaggtgaaaccccatctccactaaaaatacaaaaattagccgggcgtggtggcgggtgcctgtaatcccagctactcaggaggctgaggcaggagaatggcttgaacccgggaggtggaagttgcagtgggcggagatcataccactgcattccagcctgggtaacaagggtgaaactccgtctcaaaaaaaaaaaaagctggaccctttaatacgcctgtatacctctgtctactccttcccccctcccccagtcaccttctgtggctcc

SEQ ID NO: 220 - DNA, 86041 bp, Homo sapiens
  source 1..86041: mol_type = genomic DNA
ctttgatttctggcagttcacttaccttttctgtttcagtttcctggcctacatttgttttttgtttttgttgtttgtttgtttgtttgttttgagatgggatctcactctgtcacccaggctgaagtgcagtggcatgatctcgatctcagctcactgcaacctctgcctcccaggttcaagctattctcctgcctcagcctcctcagtagatgggattacaggcacccgccaccacactcggctaattttttgcatttttagtagagatagggttttgccacgttggccagtctggtgtcgaactcccgacctcaagtgatctgcctgccttagtctcccagagtgctggaaccacaggtgtgagccaccaagctcagcatcctggcctacatttggaaaaaaatattaacttattcggtttctccctaccttgcagagatagttctaaggatcccgtgagactgtgaactgggaaatatgttaaaatagaaaggtattgtgtttcttcctttcctccaaactgcctttgcgagataccaactcccaacagggacaacttcccaaaataaaaccaggcaggagagcagggaattccgcagcagacctgtcaagggagatctgtttgcccggttcctcaaatcacatgacagcggcagctccctgtgcctgtgttcccagccctgcaatgctgggtcatttgggaagcaggaaagtgtggtggtcagcagagctgcacgcccatggcacgcagagaatgagctccccatcaccaagagtattcaagtagagtacggataatcgccttggagggaattcctgatttaagcaggagcttggaattctgaggtctcttcctattctaagaagccatggatttctttaatttgaagttcagtaccggctccatttctttcttgctgtgtgacttgaccacaggcagattcctaacctctctgagccggttacctcatctaggttaataatatagcatctgcctgcttgaccctattgtaaggagctcagaaatgctgttatagcagtacttggaaaaaattgtaatttgtaattggcatgctaggaggagctgcgctgctgttactattatcccatgcccagagggcgatcgcacaacataagcaaatgccacaaagcagccctccctacctcaatctaaaggcaagactagagtctgagaggagtcttggggtgcaggaagcacatacggtgaactgagcatttctccccatgaacggcgattccttgggtccttctgagtgaccttccagaagcatctctgtaaccttgtgaacactgacttttttaaaactgtccagccagaacttcattccctagcagagtttccttccacttttacacacaccaaaaaaaaaaaagaggcttgctgaattaatgaaccacttctcttatctatttttcctgttatctaattctgagaaggaagctgggagctcagagggagctgggagacacggctcacaacgtctccctcccacccggctgagaacagcctggaatccctgtgcagagtttgcctcacaccaggccttgagcagccgcagggacgccgctccccaccgcgggtgagtcccctcctggccctcctggtgacccctctgccgtgggaggctgggatgctgggggaatggaaggcttggggagtctccttgctcaccacaatctccagctgtggggagagggaggtgggggaggggaggggaaggcttccccagcgtggggccgaggcggaggctgtggagaggctttgaggcctttgcggacaggaaggaaggatgaggctctgtgaaggccaggccgcagacgccgggcttccttcccactttctttctgtgtccctccttcttccactgaggtggcattttagtttctctatttcccgattcagcttcccactccaacaactggaaatggagaggggtgcctggtgtctcaggaaaaacctaaataaatacatacacaccagaaatcaaatggatctgaccaggtatcccaggaccatctggcctctgcttcctccagaacacccaaatcccctggggtcccccgcagcccttggtgtcctcttaagaacgcccttggaaacttcaggcaaacctggcccatgtcagacccagcccactttgcttttggggtcagaaagtctgtgctgtttcccatcgcttggcttcattagttagtagctaggtctcagagctctcagagtcggatacttttctttgcctattcgcagatcaagggtcagccaggcttggtatagggtttaatttccgattattctggagccagacctgagatgggaaggaggcgtgggggtgggttttgcaggtggaccacagagctcgtagttttcttccccaggcccactgcgtgcgttgcagagcttggtggctaatgcttttggttgcacacgcttttgcatacaagtcgaaattacctctacttcctacaaagccaaagtctgggcaaatgagccttaaatctgatttgtagctgagaaaagggctgagtcaaaataataataataataataataataataataataataataataataaataggagtgacagctttgagaaggagtgcagctttgagaaggcacgggtcagtgtcataaccaaggctctgagagtttgaaacctaccaagtttcctgtgcctagtccacatgctcgcaggttgaaagcagacaacaccatttgttcactctgtagcctcaggaggacccagcaagcgctcttctggaattgggtaggattgagggcaaagcctctcagtcctggtgtacctattacaaatattagctttgtgaagcagagaacagaaaattgttccctttgactatctttccatctccagcagccccaccggcttccagggggtgatttgaaaagctgtcacaaaacttacaatcatctgcattgcttatctttcccctgcccaactctctggcttgcttacccttgctaatgttttcccagggctgatattcctgctcttctgtacgctgtccaaaaataagggaaattgaaagggttttagtgggaaaagcagggacgggccaatctgagttaagggaaagccgtattatgtaaggtggctagaatcctgtgatttatcatcacaaaattggattggctttttaagtagtagtagcagtagttgttgtagtatttgtagtactagcaaatgttttgtttctgctggtctcattttgataaatcggtctacagtaaaggatacttgaaagtcccactttatgaactattttttttcagagttcatttttagtgacataatcattgccacaaatttcctttttcttctaagaatttgtctctgaaagtgattttgcattctcaagttcgattaggggggagccttaaaaacaattttgtgtgcttagtattgaggaagtgtttataaattactctttctccctggtctagtctcaagtataataaaatatccatttcaaatagctttctaatgtcttgttatatttgccaagtgatttataggacagaaaattatagtttgcgtgtgtaaagttcagagatattttagagcttggagcagaggagaggagaggttttagggttaaattcaagccatcaatctccaattgtctaaacactacacgaagtggagattcgaggcaattatccgaataattgcgggggggggcactttcgcctgaattatctagataaaagagcgacacaggagaatgtcagtggccctgaaggccctgcctcggatctccacggtcgcgcgaattcgggcaatttttctgaaggttctcagactcggggatgggggaggaaggggacgtttctagaagaaacttaaagggggctcgcgccgcacgactgtaggtggagggcgtgcgccgcgggacgccccagccgggtctgataaagccccgaagccgatctaaggtcaataaaccaggcggcgtcaggcttgggccgagggccgggaggagaggagagtggagccctctcaggctggcggcggaatgaaaaggaaccccgactgctggggtccgagccctgggccgcttgcggggcgcgcagccggggagaggagctgggcgcgcggcctgggccccccacctgcccgaccccagggcagccaagcacccgcggccttaaaagtatcccggcgagccctgagtgggccgggtgctgggcgaacagtcctagccctgcactgaggttggaaaagcgaacggaaagtgacatttttacaggggcgaggttgggatcgggagggagatggagacccccgaataatggaaacgcagaagcctcagagacaccagcaacagatagagaagtgtccctaagaggggaaaatgaggaagagggtaacagtattgttaactggccatgaattttaatccctgttgtgtgtcgccgaatagtttacaaactctttttgcactggggttttgtttctcccactccccgcatgatgagaagaaagaaagattgggagaagttaatcagctcaaagtcacatcgccggggtctcctgccagggggcttggaccagttgctaaaggacttcccgccggagaaggtcttcccaagagagattcccacccagagcgcgcagcccgcggggaaaacataacgcgcgcctgtaaatgacgccgctcccacctaggccgctctggggccgcttaacgtccggaatgtcccgacccccggctcaatctttggtgcaaagcctgagtgggcaggcgggagaccaggcggtgccggtggagcaggctacttcagcagcgcgaggctcggaagatccccgcggacaggcgcgacaacgggccctggagccggggaatctctgcaagtaactaaccaggcccctcggattcattgccactttcccgccctcggcccacgaggctgaggagctccctctcatcgcctctccgttcctggcaaggccgaagccggtttgctttggatgcatttcgatcaatctggcgccacatgggccaggtcacctcggacgggtgtcgcgccgacgtccttcgtggtcgcacgctggtgggccaggaagcccaggctatgcccagccgggtccgagcggcggtcggtggcgtgacctcttgccacgcctggcgctgctgggaacgtgtctcgggtcgccctttgcgtcagagaccccccccttggggagaccggaatcctccagccgctgcgcacggataccctgggcggcgaggagagcccggcttctgcgcacccctctccagatgcgaggtgctcacccgcccctcgccctgctcaccccgacgcctcggtccccacgctctgggcagcaagacacatagcgaagcccctgacccatttcttctcagttgcgaccccctgtgtgagacccctaaagaggccaaggatcacagtaggtgtttcatcaaaatggtcactgtgtcccccaggttaggctgctggtatctcaatatccccctgcagagagaccccgcacccccgaatcccataccccaggctgcaaagcacagatctaatgccttccttctctggccggatttggagggacattgaggggcatgggtggcgccccaggctcgcagggttcgtggtccggaaaaccgagcccagggaatctccagctccgttctgttcgcagaaccttcgggggttagtcacaggccctggcccgcgcgggatctggaggcagagatttctcgacgtttggggacttacagctcgtctgggagcgactggattcccaggcctccgcacgctgaggttccggggaagagcactgtcttcaccacttctcgacctgcgccccaacccatcaaatttccagcactcgtccccctaggtctcataaaaactcctggcagacccttccgggatcacgcgtggctcaactcgggggccgtagctacgatccccgcgcagacgccggaatccggggcccggtccccgcgcggggtgcggcgctcgcggggggggggggggggatggggtcggtccctctcgggaacggctgctgttgtttctttagatactgaatataatttctccctcctccaccccactcgctgttcttaacaattttatttattggtttactattgtcttgtgaacgtttcttgtctcctccttgccttttttcatcccctttctctcttcatttctctctttttccttaattctgttgcaaagtttccttttcttgcttaatcaaaattctccccgcttactttgttctttgcccacagcattcgttcttcttttctccttgcctgcctgtcttctttcccgctgttcttggccgtgggcagacccggctgatgtaaggactgcagcttttccctggcatactctgcgccttcagatgtggtctgcgtctgcctgggtctcttcccacctcaatctgagatccttgcccctcacaataaattcgtttttattcattctgatgtttgtctacagaagttactcgataaagatgttttgtttcatgaatcaaaaggcttcttgtctgtgaattattttaatttctggatattaaactgcacagtagctattttatttgcctttaataaatttcttaggtttttacctctaactaatggcacattttaaataattttccaagcactaggtggtgtctgacaagattgattcactcaaaaacgatgcagaatttcttaaatgtagaatcttttaaaacggtgtcggatggcttctcctgctacatcgtttatttgtagcttccactaactctaaagattgaacaggaaactgatatggtagaaatagataactttgccttgttcactagctaagattttatttgctttctgttagatcacagtagtgctatcataataatgatagaacaattcgtcttttttgtagataaataatgatttcgagtgcttattatttgttttaggtagaatttgttgttagatcatacatgagaattttatttcatagaatagtgctgatagatagtagatgcttttcatttccaacaaaacagagacaagattttgcttgtaagaagtttttttcccttcaagaaacttaaagaaagctttaactcttaaaaaaaaattctaacaaaactttccttgaagaaacaaaatttttaacggggaaaaacttgaccatgagaaattcagaaggaagatgtgaaagtcagctatgtctcctctgcaatgattgcagaacaacaaaaatttggaaagttactatcctactggtcagacgtagtagtccccgtttgtgcaaaaacacctcttggccgtggcgatgtggggagggagtgtggtccaatagtccttctcacttctcagaggttgacacagaatctaacagttaccctcttagaactactccggagaattcggtaggtagtagctagtttccacaccggggacctgctttgttaaatgctatgggtgtggggacaagatactgggttcagagaaagttctgggaagagtcttgaggtggaaacagcctcggtgcgcgggggtttctcgacagctctctggtgtctcttaccccctaggttttcccagccttctcgccggattgccttggaaagctcttggtgtggtggccactggggtttgctccagcagagataatggaggggctcgctatctaatctggacagcagcaggaacaatccattagacctcagcatttatccggagcgggggaggacggagggacggggctggcgtgctccacctggccctgggaggcgcagagctgccccacaggtggcagggggattaatcagagagttttgtgctaaatcaaaactcaccactgcgtattatgcttgctgatgccggtaaatagtaattctacccattgtgactgttaggaagtagcagaatccttttgggttggaggtatcgttttttttcttttaagaagttcaatgagctttacattgtctcattcaaactcacccatcaaggggcgcggttcgattccaactttcaccgtattccttgagactaggtagactaaatccatccccccattctttcattcattcattcggcaaacatttaccaagctttcctctgcgctgggcgttatgccttgtactgacaggttaaattatttgcccaagatgaggactaaagccggagactggggcgggaccctaaatcaactatttcagtcccgcaactgctcacttgtttgccccaagacacacaaatcggagatgtttggcgttggaagggccccagaggttatctagccagccttccattcagtgcaggaatccctccccacaatgcctgggccaggcccctacctgtactctctgccagctcaggaaactacagctcccgggtgggcttcccatttgaaactggctctgtgaacgggaaagaatttccctgggagaaaatggtcttagcctgcccacacctaaacttggactgctgagcccttaatgctactgtgactcccaagtctccgggtttatgccccaaaagtaagagttcccctgcccagggcaacccatgtcctcagccataactggctggccacgacctgggctgtgccatggctcccttcagccttgccctggtgatggagatccctgagctgctagaaactaaagcccctgaaacctgaagacgctgtgggccttagtcaagccaaccttcctctgatgttatggtggatatttgctgccaggtgagagaaaacactacagggagtagccaaagaattgccagagcctagattctagattctagttcccacacaaacacctacaagctgggtgaccttgagtaagttatttcacttctatttctagcatagtctaaaaataaggtgcaggaatgtgcttctcaaaagttgaaaatgacatctttttcaaagataaaatttctccttatagtctgtgttcacaaaagccaatttctgaaccataaactcattacaaagaatgttctggaaaccttttagatttgtttagatcctaaatgtacatcgtccctaggtcagtgtaagagtttagactccagtattagaatgttgtgatttgaattccatctcctccactcactggctgtgttttcttggtcaaattacttaacgcttctgtgtttcagtttcttatattttaaaatctttataaaccttagaggacggaaagactgccctaatccctgacataatcatgtgttcagctggatgctaatgttctccttgtttttgtttggctttgtgtgttttgtttcttaacctattacttcaaaactcttcagaaattaaatacatctactgagaggtagaaatttatctgacacactgataaatatgttttttatttagcttagccaaaattgactgctgctggtggttgtggaaattgtgtgagttaacctttccgaaaggcaatttggcaatagatattcaaaacccaaaaagtggtcatattctttgacccactttttctggtaatagaaatttaccctcaggaaataatcagagattcacaagatgctttacttagcaaagtttataatttgacaaggacgcaccaaacattatgaattgaggtgaaaaacagaaaataacctaaactctaaacaataagagtttacttacatgaactatactaaatccattacacgatcattaaattatgttttcttaagatattcaatgacatgggaagtctcgattcttaagaaagaaaaagtagattgtgaaacacttctaccacagtcgagaaagagaagagagaagactaatgtttccaattctttctgcctaatgtggctaaggatggatttggttgtccccgttatacttttctgtatttccaaatggactatgacaaactcgtgtttatttgaaagcagaataaacaaatattttgagagaggtgaggaagattggccagatccaagacatgtcagccttcttcaggcttcctacgatgtttatgactggtgcgctttcgtagcaaatcatttgttccagagaattcagttttagggtccccaaaactcaatggactcaaaactccaagaacagccctggactcctgattccaggctagagatgttcacagttggtaggagtgatttttccacaaggaagagattcccctccccatttagaaaatgttttcaggtccaaattttctcagaatttcacttgcaaccttgagtgtttctgaaattgaaaacaatcatctaagttcttgtaacttttccctcttccacgactcccttttctggcaggaggatgtggtgggatgtgaggccaggtgtggggtagtgatgggggatgctgcaaatagaagctgattattcagacctcagggagggagaaaaggaggagacttggtggggaggaaagtcagagctttgttggtggccaagaagccaggtgttcagaaaggaaggccgtttgaaggcaagagagccaaagcggaggacaggactgcagactgaatgaatcacaagacagctcttaataaatgtcaggttccggttttgaaactgaaatagtttgcacttgtagagaaacaagtagcagatgccttcctcctgctttacaagaagggtgtgggatggagctgggggagagtggtcacaaaagcaagtagaagtgagatcccaccataaacttaggagaccttcaaaagatcttgtactgggtctgtttttttttttttaatcttaatgtagcacatcccagtcaacagaagataaaagtaacatcgagataaagaccaatttcacttttattaattagcaaataaatagcaaataaattgcattctgaatatagcatgaaatataaacttaaaataccatttaataatggtattttctttctctaagtcctacatttaaaaaaaatttttgaggttggccttcgttggttgggtgggtgtgtttgttgataatggagtgtgaatagaatttttgcaaatcacagaattttctgaagactggaggcagctcctcctaagctcatctcttcccttcttcatctacaaggcaagcaaggccgagacaggcaccatagccatcttcatgtaattttccagccccctacactgcacaggcatagtggtaggaactttcctgaaggatgattcttgcaggggtgagttccagacacccttgttgacttaattctctacaaacaaaatcctcaggctgggcgcagtagctcatgcctctaatcccagcactttgggaggccgaggcggtcagatcacgaggtcaggagttcgagaccagcctgaccaacatgatgaaaccccgtttctactaaaaatacaaaaattacctgggcatggtggggcgcgcctgtaatcccagctactcaggaggctgaggcaggaaaaccacttgaacccgggaggcggaggttgcagtgaagcgagattgcgccattgcactccggcctgggtgacagagtgagaatccgtttcaaaaaaaaaaaaaaaatcctcaaccacagttgtttaatctgccccttttctaggaaggggattaactccaaagcctgagcagacatctgtgttcttgatgtgcagaggatgccttccaaagcaagagatgtgagaagtgaggaggacacagctgggagggaagagatttcccttgcctttgaaaaacgcttcattctctgctagctaggcattctgggatgggtgggtcagtatgttgttgactgcttttcttatcgctgtaccatttagcatccccagaaatggctcctcaggcacagttttttttaggcatccatagaccaccctccccccgcagagaattatccagagaagtatccaaggtgctccatctttgtacagttttgtaataatctccacctgtaatcaaaatagaatccgggaggtcaagcaatcctcctcttggccctgcttcaaactgctgaaccaaacagagctctgtgccctcatctgtgagttgggggcaatgaataattgttgtggtttatcaaagtggtatcacatacatcacatttgaacctcacagcaactctctggtgtattattagaccatttccccctttttatagatgagaaaactgagattcagagatgttgtaaagccaaaggtcacagtactaataagtaacagaattgaactcaaaatgccttgctctaactaccaagtgctgcctccctcaccctccagagaaaagccaagaatacaggagattgtctacatgagctgatatgtaatggctctgacaggttttattgggatcccttactcatccaaaaatcaaaaaattacacagctacaaggctcctagaactgatcaagccctgcccccgtttcatttggcaggtgttgcccaatgaggttgagtgatttgccaaaggtcactccatgagttcatggaaaatgaccaatgtcatttttaaaaattagttaaaagtaccttctaccaagcccatttttatggcttattttaagcaggttaataagtataccaggcacagcttaaacccaactgagtaaatgctgacaccagtttatagattcagcagataagtagcaataaggaattattcatctctcatttatcatccagcctttccaaggtgcaagttataaagtgaagcaaatagcagttcaagagccccccacacacgtgagatcaaaacagtgaaaaacaaattgattttcaaagctatacatttataatgcgtctatgcctgaggtctcctgaaatatgaaaaagaataatacttgggaacattttttgcatttcagaaataggcacatttcttatacagagctctatatttgaccttcagacatattcaatcattaattcattcttttgagtatgtattgtgtacctactctgtgcagaccactgtaggggattatagaattactaaaggatattccagccatcaagaactttttaaacctactgaggtgacaaaataaagcacacatgcatgcatgcgcgtgcgcgcatgcacacacacacacacacacacacacacttgaatctcaaccctataaatctttgtgtggggacgttatgtgatgcccagagtcagtgggtgtcaggggagtgtgtgcatggggacaggagggaatggaaagattgcctggtgtgactaggggagccacaactaggaacacattgaggaggtggccttgcctcaaccttctccccagtgacatatctttctcatgagaatagtgttaggaaaattcataggcagaaaataagacaaagaattgatggccccaattaagaacctaatccccaaatcccctgaagcacaaactggtggagagatgggtgagggaacaatgggggcaatagcagttataatatttgtaatgtctgcagaaaatgaataaaatcaacagatgatttatttgggaggtgagcactaatgaattctcatgtgttattcagaaaggtcggtttaccttatatttttatcactcccagtcttccagtggtggacctgagacccaaagttcaatataaataacaaagcagcggcaaatccaataagcgactttgctcttagctgcccagacaagaagctgcaagacgacttctggaacctcccatgggtcaattcactgtccctccccagggatggggcctgtttcttcaggccagtaaccacttatttctgggccctgcatctgtgaaactgaagcattttccagtgtaaaaagaaatgggaagacattcactcaaaatcctttacttgggatattgggaaactgaggctcagcaaattcaaatgacttatacatagagtgaccacataatttatgcaaaattataagtgaatgtgtatatcactgatgattacccagaacagcagcatgcacctgacctgtttcaggcatccaggacattggatcacccccaataaacaatgagaatcagaacaaggacccacccattatgccccacacacacttggctaccttcttttgtttattttgaaggctgagtccacaagaccattaggaagatattcagcctagaggtgcaatatgtgcctggtgcccattttggcttggtttatccccactctaagtagtgcatggaatgactgcggttttgaatgtctatgacctccctttacctcatcctcaagccctcacccacccccacccttggctgggccagggtcactgtttccagtgccctgcaaggggtgtgggcagcagctctaaccaggctgccagacttctaggctctgcccgagagcccagggctgccttatctctgatcctctcaccctactgattacatcagggcgagggaagtttggccttaggagtcaatgtatagaggggaggtatcaattcctatagtagcatgttgaaatggataacagaatataaccagggtgccagggaaccttgtcctggctgtgctggtaaataggtgtgtggctctatagccctgtctggatactacttgcctcttctgcaaaatgagtggattggaccagaatccttgaagtcccttgcaataccagggctccacatcagtgtcagagagaggctgtctcaggactgataaacgggccaaaggtacctggtgccataatcacccaccaatggaggatgaaggtgtgaagaggtgccacgtggcatcttccgcacatgagcctctgtgtttgcacacagtggaagagaccatggcgcccgtgtctcagccacagccctgataccacatcttcagtcatcaaggatggggatttacactgtaataggacaaagtggaaactccactttttaaaattcaattcagcaaacttttttaaaaaatgtctactatatgttagaaactggaaaatacaaagatgtcaaatataagatttctgccttcaaggagactaaaattttggagagagaggtatatagagaggcagatgtatagacaggttaaactaaaatacagtgtgataaaggctgtagaaacagaaggggaaagagactgattctggaataaggatggaaattaaaaaaacaaaaaaaagctggcctggtgtggtggctctggctcagggctgtaatcccagcacttctggaggttaagcaagagggcagtgagagggtcactccagccaggaattccagaacagcctggtcaacatagtgagaccccgtctttacaaacaaacaaacaaaatagccagatctggtggtgcgcacctgtactcctcgctactccggaggccgaggtgggaggatcgcttgagcccaggaattggaggctctagtgaactatgattgcactactgcactccaacctgggtgaaagggaaacaccctgtctgtctctcttcaaacaaaaaaggttatgtaagaagataccctgcacaataccaatgccttgcccagaggagcagtttttgagttctgcagtcaacctacttgaatttaagtcttggctccaccaccttataagcggggcaagttacttaatagtttgtgccttggtttcttcatctataaaatggaggaaatagagtgactgtgtggataaatgattgtgtggataatcaatccacgcagcatacttggcgctgtgcctggcatatagcaatgtccagtgttactcagtaaatgtttgcctagtaaatggatcccagttttcatctgcaatccaagccttttattttgcatattcagatgggcctcccatttttagttcctcactgaacatattcattatgaatggctaagattgagttcagacttaggatcctggtgttcccaccctaagagataaggcctcactctgttgcccaggctggcgtgcagtggtgccatcactgctcactgcagcctcaacctcccaggttcaaatgatcttcccacctcagtcctcctggtaactgggactacaggcacgtgccaccacaacccgctatgtttttctattccttattaaagatgaggtttctccatgttgtccaggctggatttcgagagcttaaagtcacaaaatgttgggataggaaggaacctgggagacagtttagtagtctcttcattttatggacagaaaactaaggcttagaaagttaagtgactcgcctgtgggcatggcagtcctctggtggcagtcgtgggattagaatccgggaatcctgactcccagaccaaggagctccctccagcctcaactagatccagatcctcgaggcctaagcttcgctctacactgacactcaggccacagcaacctggggtccctccctcctctttctatggcgccccaaacaaaagactacctgtttcccagtacttaaggcacatctaaggaagaatttaggacctttcccagtccagggctagctctcaactcaaagagggaagaaaaaaaaaaaatcaaaaaccacttcagaccataaatgctccatgttgcttacaatgttgactttctcctttaattctcattcagggagactgcttcgcaggggatctgttcatgatcctcaccttagtgtcaccaacagaggtggccgtgggtgctttccgtagaaagggaaggtgacaggtgaggcaggcaggagctcgggccacctgttctccagcctaatggcctcaggtaacagcccagcagcctcactcctacttccccaaaggcaagagaagaaaaacgaggcaacaaccagagggaggaaggtggaactgggggaaactgagcgcaggggtggagaatgaactaagctccatcacaccttttcaagcacagcaatgacagtgtgtgctgttataaaagaacacttgctccatgagaacattagaaacgtacaaaaaatttcacgcaagacctcgccgtctttatacgcaggtgtatttacgttgatttctctacctatcttatctatcactatataattcgaatgaaccctaatagaatattgaccggtgtcctgaattttctcctcccgtgcacagcgtgagtaattcccgtgaaactatgctcatgcggatctagattgaatctgatccttcgggccgcggcggctccgcctgggagggcgtggcccccgcgctggggcgggaaccggcttctggggacccgcggcctctgcgcctcagccgacctccaccgcgggtgcgtgcgggggtgcgggggtgaggggtgcggggctgctccgtcgggaggctgggagggagagcaggcgccgggacccacgcgagggcgcggacggacggggggcgggaagcgaggctgccgaggggaggaagcggggccggcgcagcgggcgccaggccgggcagaggcgggggcggccggccgggggctgaccccgagcgccgccgagtttgcgccgcccgccgccccgcgctcgcctccagccgcctggggttccgcggcggccgtcagcgcgcacctcatcaataaggcctgccaggcgccggccccgcggccatccatcacccgggctgcacccccggccgcgcaccgaggcttctgccagcgcctgcggggcctctgcgtggagtgggccggcagcgtttttctacccggcaacaaatacatggctttattccacttcttaatcccagtgtctgttaacgatgtggtgttcatttgttcctaaagagctgtaaggaagcttagaaatgattcggcaagctgggcgcggtggcgcatatttgtaatcccagcacttagtgaggcagaggcggcaggatcgcttgagcccagcagatagagaccagcctgggcaccatggcgaaactccatctctacgaaaaaataaaattagccaggcgtcgtggcgcgcgcctgtggtcctgctggggaggctgaggtgggaagatgtgagcctggggaggtagaggctgcagtgagctgagatcgcaccactgcagtccagcctggtgacagagtgagaccctgtggagaaagagagaaagggagaaagaagagagagagagagagagaaaaaaagaggattgattcagcacaaacacacacacacacacacacacacacacacacacacacacagagagagagagagagagagagagagagagagacagaggattgattcagcacaaccggtgcatttcacagatgaggagaccgagggccagagtgggcggctggcgtgcctgaggccacaccaggaggaggtgatggaaactatactggggcctgcatctcttgccctacccccactcccagcccttgtgccctccaaatgggcactccgcaggtccaggatcgatatgagtgtttggcatcgaatgtgtgaaaagggccaagtcataggttatgggtgtgggtgtcagtgcatgaacagcacagagtccgcaggcattctgtcccccaactcaggccacagcctgtgtgtgcgtctgtgtgcatgtgtgtgcatgtgtgtgtgtgttgaggtccagaaagagtactaggtaaaagagaggggggaacacctctacattaaaagcaatgtgttccttgaattcatttaggtcgtctcccacctgcccttttccccaaggaggtgccgtgggtcccccttcctgctcgtgtctgccagcgctcactcctgctcctgtctgcaggacgcttttgttctccggtttgcgggtagaaacttgtgttcatccttgtatctacaagtttgcatgatgcctggcacatagtaaacattcaataaatgtttgctttgtgaattgtagctcttatgagggaattcgaataattctggatcagagggcttgtaggctgaaagaactcacagatcaggtgtccaatctcatttcataagagggagactgaggctcccagcattgccccattgaaccgttgcctgtttcactcaaggccttcctctgtaaggtcagagctggcgtggccctcagggatcctttcttttcttcccccagaacattgcgctgccaccagctctccgagccgtggactgcatcctcatcacttctttcccttgccaccttttggttcctctgctgcttaattagcaagctctcccagggtgagggacagagaagatcatggaagccaaactgtctgctttgttcctaagaggaaacacaatattttgtgggggattgttttgtttttgttcatggtgttgttttcttagtgttggtggtgttggattttaaattcaaattcaaatgacgaaattaaaatcagtgaccagtgggtgtctgccagtcttaacatccatttttcttccatgatcacagaggtatgactggagttagaaacaatcatattatcaagaactctgggaagaggtagaaacaatctctctcctctctctctctctgtctctctctcactcacacacacacctcacttttattgaagagcaagggtagcaaagacatcctgtggcccaggcagtcagtggctttgggctcttgtgtgatgtccactagactataattgctgtatatacaagtccagagtgtggttttatctggcacagagcactttcatcctgctaccttgcgccctgatggtagcccatccatgtgaacatcgtgacctgcaactgagcgtaatggaaattgacttaagaatgacagccagaggctgggggcgcggtggctcactcctttaatcccagcactttgggaggccgagaggggtggatcacctgaggctgggagttcgagaccagcctgaccaacatggagaaaccccgtctctattaaaaatacaaaaattagccgggcatggtggcacatgcctgtaatcccagcaacttgggaggctgaggcaggagaatggcttgaacccgggaggcagaggttgcggtgagccaagatcgcgcctttgcactccagcctgggcaccaagagtgaaactccatctcaaaaaaaaaataaataaaataaataagagccagagtaatgggttctgcagaacgatatcatcttgtacagaaaaggccatgtttcactgactgcttttcccttagtccattcagaaatacagtcctacgctcaaggggccaaagcgtttctctttcaaggccagtccttggcttacccttgcctcaggggaacacctggaccaaactcagtttccaaggactgactggttctctccgcttcccatcaccctctcccaggcagccatcaggttgttgaaagggacttagcaatccctgagcttctgctgtttggcttcaagaccttcaggatgtgagaggaggataaccctcactctgacgtcacccttcctgcagcctgcccaaaaacatgagtgcaccggcgctcgtatgtttgtgccatacatgctcaagataggcactggagctgtacccaggatggaccactgtggccattcctgtggactgaggatgagcaatagggaggaccaaccttgaaaaatgatcctttaaaaagaaatgcaaggctttcttttgtatagaaatcacttttctaacatattttagatgggagtcaaacgtgtaccagggatgtggactcgcactaaagacaggatggggctggagagaatgggagctgaagagtcttatcctgctccacctgtgctctttttccttctgcttttttcaaagccagatttattgaagtgcaacttatatacagtaaattcactccttttagtgtacagttttcagagtcttgacatacacacaaattgtgtgaccaccatcacaagatatgagaatagtcccagcgcccctccaaatttcttcctccccctctacagtcaactcttccccctcctcagcccctggcaacctctgatctgttttcagcccctattgttctgtcttcttcagaatgtcatagaaaatggattttgtctatcatcttttgaatattcttttacttagctgaatgcattcgagattcattagtgttgctggggtgtttgttgttcattcctgtttgttactgagtagtattccattgtatggatgtacctcagtttacctattcccctgcttaaggatcatttgagtggtttcccgtttggggcaattatgaataaagctgtaggttttgaaaataacaacaatactactttagagtttaaagtttaaaacacaacttatatttagctcttcttgtcctgaagctcattgcaaatagtatatctgctggggcatgttcaaagactggggtgaggacgtcacaatccctgacaaaaagtggtgtatggaggggtgtgtgcatctgcattggacgtgtggaaagaaagatatgaattcagagcttcagaggtgcagcaaagacagagtgctcacagggtgattgagaaactgaggtggcaagtaagtctttcatttactctacctgttctgagcccaccagcccctgagcctacccatctgctcagggagagtgtgggcccctggaactgggcatctgcagagacttcctgggggaggggtggactttgcccctcactggcggaggccccccggggagatggtgtgaaataggggagggaggaggcgatgaggtcgggatagctctgcaccttcctgagtgacatcctgccagtgccctccacctaggtgcggagggctccatttcactgcgcccctttgcaccttggattttctctcttcacttccttgccctttggcaacttgctgttcattagcacctctgctgcagaacagggggcagcaccagaagtcccactctaaccggagagcccctgtccttctgtcaaacacacgcacaggactaacgagggggatgagtggaaaccagccgcaaagaaatggagtgggaggttcttctttaaaatccattccgttcagaacacagtgaacaccctttgacagaacaaggactatctagctattccaagctccgtgcctcccctttcttgagactgttgttacaagaaaccgatgatttctaacaataggaacctcccagctggggaagcggtgttcggaggggagcagcgctctcggtgggcacctgctgcagttggggagggagaggtggtcgtggaggccactttcccctccaccgccagggaagcctggtctgtctgaaggggtcctcgcctgcgccgaggatggccggacggccgggcctccggccccagcacagcccccctttcagaggaccccgggtcttcgcgcctgcggaccagaggctgttttcgcacttgggcttcgcgcttccttgacactttcctgtctctgctcgccgcgccaggtcgcggcgcctgcctgggcgtcttctccaactccgggtcacctcggggcgagggcaagggtgccgggccggtggggcgttccggccaccacggggcggaggagggagcggcctttgcggaaacgggccgagctggctcagggaatgccagatctctgggggacccaccagtcccctgatgtgcgcgttgaggtcttgggcctggcggcgctccagccgcgggtgtccctaccataaccactgtcctccccgggagctgggcaagaggagccctggactctgggttgacctcgtcccggtcgggttctctctcctcccacccaggcccggccgctttctggcgtccgtcctctcccaggaggtcctggcctctctctgcgtcgccaagtctcttgactcccagctcgccttaacttcccagggtctgtggtctctctcctttctctgtctctgctctctctgcccgtccattgcctgctttggtttttccataatatttcatcattcaacactgtatttgacttacttattgtccgtttttctcttacagcatgtaagctgcttaggatagaattcttctctactttgttccatgctgagtactcatgcctgtagtattcctggcacagagaaggtgctcagtcaatgggaaatgaatgagtgggtgagtgagtgaatgcatgagtgaatgaatccccatctctccctctctgctgctggccagtcatttctctctgccctggtctctgcctgtcctcctctgtctctctcgcttttctctcccttctcttgtttctcctcctccactcctcaccctgcattttttcctctatccggctgacttggtctctccatccttccaggatttatgggttgggctccctatgcctcagaaagggtgcccctggcttctggtcagccttcatccccggaggcccggggactccctcgccagtctaacagcctaagcatctggccaggttcccagctcaacttcccaaatcctggctgtgcacagggaagtcccttcttcctgcagtccccaggacctggggaccccggggtgtccttaggagcagcctagatttgagctggtggtttgtaggcgatagcagctccacaggcagatgaagccaccagggagatttgtgccacccaggctgggcccctccctccacttctggccagtattctactctgagaaatggcagtcctgcccaccagtgcaccaggtcccttgaggggaatgtttcattctccatctccgagcaactttgatggatgttattaacagccctttttaaaattttaatcattcacccaacacttattgagcacctactgtaatccttgctttgggcagaccaggattttgatcactgcattcacagagcataccttttgggggtgtagaagggaggtgatcggtgcatgtgtgtggacagccaaccccatataaattactttataacttcagggggcatggacaagtgaataaagcacaagatcattttactagtccagggatgttaaccctggtcttgctctgggctcagcacaaacaacactgtgacttcaaaagtctctaactggggagtagcaaagccccatatgtgaaagaattggggcctgtgtcaccaagagagatctcagaggaggcaatccccgaagaaagggccccttacagactcaaagaacctccagtctgggaaccagactccctatgttctgggtggtgggtggcctgggcagtaggtgttagcagctctttcaggctgccattgtctccaggtccttggatggggagggagagagggagccaggttggcagcaggaaaagaaacatacatggcggcgcctgcgtggccactgcgcctccagcgctggcgctcctcaacctgctggggcccctgcctggacttgcaggcactggaccaggcttcagtcctagcctcagctacgctggacctgaagagcccctccctattcaaaaaggctatggtgtccgtcctgaactcagcaaaaatgttcagagattcctttccacttttttccctcttcctgtgggctctcagattatgagatataaacttttttaaacattgattttattttttaaatgttaaacatgctcattaaaggaaactcagaacaatttttaaaagacagtttttaaaaatacgttttcatggtagaaagtcgatattaaatagaatggaaaaaaaagaactaagattcaggaatccaggttctagacctgcagtttcgcccttgctttgccacctcagacaagtaccttaacctctctgagcctccatgtgctggtttctaaggtgagggcgataacaccgtctttcccttcctcttgctaatgatattgttgttccctagagaaaaatgagatttgaaagtgttctgtaatctggaagtgactataaaatatgagagggtgtgccagaaactctggtcctcagggctggaagcaccaggaagcatttgaggaggtctacgagggagaagatgtattcgctttgcaacccagagtagtaatttcgaaagcaagaccattaacaaggattgctccttcctctcctctcgtctgtaaccggctgcagagcacggttccgggcgaacagggcggaggctctacgtccactccgtatccccaagaaagagtgtccgaggcacggaccatagcaagtgaaggaaggtaggtcgacgtggccttgcagctgaattcgttctccatttttccttcagcagggacgcatcctgctctgcaccctggttctcggcgctgcgcccgcggaggctcgtgcagggcaggctgcccgtgcgggtgaggactgagtgccgcgcagggaaggagtatcgcagaccggcgcccaggcccagcgggggaatccaagggccgtgttgcaggactcggcattcgttctgcgcgggtcaccttgaatgtctgtccggatccctcgcggcagggccgcagaggcgcgtccatatcttggaggaattcgttccatagaatgaggtttgattctctctggggtttcttgttttccattataagactctggcgaccttggtggcgccagattttttcagatgttgcttttgttccgggtgtagcggccaagatcatggacccaggcgtggcacttggtttaaaacaaacttggacaggtcccaccaaaaactcgcagaaactcggcgctggaaaaccatcagtggcttcactgtgaattccagcatccaccgtttatttttatttttggggggaaccagtgtttagattgctctgtacacaatacgcagcgtacaatttgcctcttctggggtatggaccagctcaagtcccaagagccttaatggaacagggtaaagcaatttattcttgccttggagatattttttaaaagagtacagtacacctaagtaattcttgtttgtctaaaatctgacgacctgacactgggtcattagacccaggttcttagaaaaaaaaaaaaaaaaaaaagtcaaagacgttcacagtgttaaattctcctcctagactacgggaaaggaaacccgagagaggacttgaatggggattgggcctgtctacccaggccagcccaggcatatcttccttaaaaatagccaagaggccggacctcagagcacccacccgctgccccccttcccagcggcctctggagcgagagagaagcctgggaacctagagaggcgccgataaacctcctccagccggcggcccagcgaggccttgaaatgctccccgctcctggcaacgcacagccaacctgcaggctcccgcttggcccaagggagggagggggcgagcggagagcgaaggaggaaaggagggaaaaggaaacacccccaaaaaagcaggccgtttgccaaccacccctggtttgtccttgagctgaggccttggggagaaagttggggcgctggacctagaggaaaaagccacaagaaacataattttctctgtcccaggcgacttccagagacagcgaatattcctgggtcaggggatcccaggtttcagtccactaggagtgccagcggaaggtgtgggtaaaggaccggggtggtggggggtggtgggaggtggtaggggtggcccagggttggcagaaagcggcggctcaggtaatctggggttccttgcaagcaagcacccagcaaaagcaggcgttcccacccagcggtgtggcagcggccatccacagtacagcctgttatagccccaccatccacagcacagcctgttatagccccaccagtgtacagagcagggggttgaagtttagggaggatggggagggcgagggtgaaggatcgccgcaaggcaccgcacctcccgctgcagcccatcccgcactactaggagaagccggcgtaggagcgccgcctgtgtccttggctgtggggaggacgtcagatggcaccccgccagacactaagccccaagcccctggcttgttgctaagaaaattcactgcccggtccagactcagcccttttcgccctttaagggtcgcgcgtgggaggcagctctgagaccccgggtagcgctggagccacagatttcctccgagaaaagaaaggccgggatagcttcccgctcgcccaagcccagattttccactctccaggaaggccttgcaggtccctgccgcaggccttggcttcgcgcctctctcgctcgccccccacgaagatgattgccggtttcaaaccgggagcagggagtctgcttccttctccgctgagtccgaaggatcgcagattggagcgtgctccggagaccgcttttccgcagcgccggcctccgagatccccagcaccccttcagccttaagttcccacgtttcgggtccgtggcgccaattctgctaagtagcaggctaggaattgggggaagtcggagaagaaaccctaagtgtgtcgcccccagcttccgggatgcaggcccgccggggtctagaggggcggctgccgtgcgtccagcctgtgcgcaggcctttcgccgctcggcgccccaggcagcctcagtttcctttcctctgtttgcgccccagtgaacctccgcacctctcattcagggaagagaattccccgcgcagccgcgctcgtttcttcctctgggattttcctgagaatccccaggagttggccacgatcccatggggggtttccttctacccagccccgcgtcctggcctcgtccttaacccccgggttgccttcactcaggctgggaatccacgattgatttcctactacggaagcgggtggcgttcccagcctgctttcggagcagcacgggtttcgtgcagggtgttatcccgaccccttcccccatccctctaatctggcttgagaagcccgtgctggagagaaaaacgcggccttaaaaaaaaaaaaaagtttaaccgaaagcgtgagagccacccgccggctgttatctggggctgaaggctgcggtaatcgatgggttatttttacgcggtaatagggccctgtgattgctctattaacctttagacctgtctgagggactctccggctcgcagccccgctgcgctggggcctccaggctctgacgccgactcccaactcaggcctgacacattcccctcccccataccctggaagagccccctccatgaagaagctcccctggaccgcctggctccccagcccttgccacgtcccttggattggtgcagagccgccgcaggctgcagaaaaaagggggaaagattagaagagaggaggccacaggagatgggaagtgtcgccaggaagggatgcagattgcataaatacataaaattgaggctgaggcctgggctcccgaccatctccctgggattttgggaaggcaaaagggaggcttcggtctctacgctctgattttaggaggcagtctgggtgtctcctgaacctccaaggaatccggggctgggaggatccccactacccctgcccaggaactagcatccagccgggcaccccgggtgacccagtgccccacacaagatcgagagttgagcccaagaggtcaccttcttctctactggccccgcccctcgcccgccgctgcgggatgaggaccacaggaagggggggcggggagggagaaagggaactcattaataaagctgaccctgggcaccacagcgaacccaatcgacctccggctgggttgcgggtgattccccgctccctggcggtagcacttgggcattttccgcggagaccccagagcctggactttgcctgctgggggagctttccgcacagtcccgcagcctgcgcccagcggaggtgtagccggggccgcgcacccccgccccgcccttgcacgtgactcccacaggccagtcagcgccctagggccgagttgctgggccggggacccgagccgcgagctggggacttggaggcggccggcgcaggggccgcgagaggcttcgtcgccgctgcagctccgggggctcccaggggagcgtgcgcggaacctccaggcccagcaggtagggcttttttcttccctttctttgctccttcccgcggtcccccaaactcggagcttctccgcctttgcttgtctggaggtagagaggtagctagtgggaggaaaagagacgtgcgctactcacttcaccgaaattgcccaacccctgctctgcttttgactttgccttagcaacttctttaagtcaaagtaagacttgggggcaaaacagagaaatattggaagcgcctttggattctttccgtgtgaacttgaacgctttcaatccctgtccccgtgtgcacattctccaacccttgtttgcatatcgcaggccggggcctgggtggtgatggtggccgcgtgaagttaccgggactgacgggcccgggacaggctgcacggcagctcgcacatggagggaagtagacggaggcttgtcgcccaccagcgactccggggacgcagggtggcagtgccaggcagctccgctgggcctcaggggcccccgggagccgctctgaggtgcggagaggctgctgagtggcggaactattcatgccctttctggccggcctcctcgccctcggggctggggtccagggactgaatgctcctctggaagctcaccaccccacctgcccgcgctgcttctacctgaaactggccaagggcccgagcccggaccggagccgtgacttccctccgccggccacggggctgcccggatccgccgggttatgtcgcttggctttgggctcaggggtcaccgtgggcagaggggggtgccggggtcgcggactgccaccaggttgaggaaaggaggggccttttggctggggaaagagcgtggtgggggacccgcggccgatggaatccctggggcagcgcggcccgcaccgtggaggttggggaagcgcctcggggaagtgtttcctgtgttcccagaaaaggaagacaaccgagagcaggtttcaggcttttaaagaaagcctggggtgtggaggtgatgctccgcacacgtctgtgtctcctcccctgctgcggccggcttggttgtgccggctagcgtgcgaccgtcctcctcgctgcaggccgagagcggaggcgtaaacccaggccagcgaggagtgtcctataaagggacggggacttttcggcgcttgcaattctcccattctgaaaaatagatcggaagagggctattggttgattcttgaaaggggagcgcatttcctgttggcctgcgaatttggggtgaactgggacaagtgatcagaaggagagcaaaaactccccgattttggcagcctcgggagctgctgggctttctccgccaactgcaggatccaggctcaatttcaacaaccagccagaggcgttttccaagagcagctaattccttgtttttccagaaagttatagaggagtattttctccaccttctgttgttctagtaatccaactcaggcactatatcagccatttgaaaaggcagagaatgtgataaagacaaatattagattgatgacattttttgcatttaccttttaaagtctgcaagttactacctgtgtgtatactggaagttggattataaaattctaaatctcctttcttttccaaagttatgaaagaaaaaaaattacattatcttgaagaactgcaggagttgagtattccagaaaatgcaatgaaataggtcagctacttgattttaaaagtcaaatactggatcttttattaaggtaaacccataattctttaactttattttcaaagggaaaagttggtgacctcaggtcaatttttaaaaaaatctattctctaaccaaacttgctggaatgaactatttgccaaaccaataagttattgcatattttgaaagcaaataagcttttaggagttaccatgtgactatataatacaatacagtactattccattattattactagtgatgttgcaaaaaatggtgaaaagcattatgtagtgtgtattaaagattccatttccagatttttacagtaataaagatgatcatttattatagtatatacatttgaggtactttcttgtattatactagaaatctgtagtaatagtcaactgttatttagaactttctttttgcctgttaggacagttttataaaaatctgttataagtgttttacaaatattaatttataatcctcactcctaagcttcacgatgactctacaaaataagtacctttaatatctgcattttgcagatgaggaaactaaggcacagagaggctaagtaatttgtctaaaggtgtttattccgtaagtctcagagcctggattcatatatagttaacattcttgtaaatctactattgaaataaaaaagaaaactttgtcgggagtagttgcctcttcttaaagagagaaatggagtgtggtggacagcttcaagcccctggagccctactgatcccattcccttcccccaccccttctgattgtactttgatcttagacaagtttcaaaactttccagtgctccagttccctcttgtaaaatgaggagagacacctgtacttagtagagttgtagagaaaaggacctggaggtaattcagacagcaggtaattcaaaaagtggagctcttattttatcagaaaaattgcctgataataacaaaacgcaggatgctgggaagtatataatcaagttccacaaactgctctttccccaagcacccaccttggtgttatgattctgcttatgggtggatttattattctatatgaagaacccattcagtgaattagaatggtccagtgggttattctgtagagcggcattgtacattcttctcacttttctggttctgatatacaatttgcaaaacgtctaaattgtaactatttgcaagaaacctgtaacttgtccgatttgacgtccacatggttagtgtatggatgagggtttcagaaccctcttcaggaggcttagcagacaccgttgttcacttataaacatttggactctacttctggttttttttttttttaattacaaacaaaactttgttaggttgttgttttgtgtaaagtttgtccttgtccccccaaggacaatctaaagttctttctaggccagtctccccatctttcttggggagagatggggaacagaggagatgagagatttcttgggtcccaggcactctgcattaacgccaaacttttggacttacaaaaatatgcttgcagaataaggtaacattaaagtccttcctgacaagcaatacaaaaatcattgaccaagatcacaaccaataactgcacaccaaagacccgggaagcccctggtccctggggcgcctctccccaggcttgcctgggccgcctgacccaacgcctggacaaaacaaaggcccctgcttcccggcaccgcgcggcctccggagctgcacccccaaatccccgtggcgacttcatttgaagcgtggaagaagcaaccacgcaagtggagagtgggttctgaaagctctgggatgaaccaccctctctctttctgtcgttcctcttttaggaccccggctgcggcgaggaggaaggagccagcctagcagcttctgcgcctgtggccgcgggtgtcctggaggcctctcggtgtgacgagtgggggacccgaaggctcgtgcgccacctccaggcctggacgctgccctccgtcttctgcccccaataggtgcgccggaccttcaggccctggggtgaattcagctgctcctacatcagcttccggaaccaccaaaaattcaaattgggattttccggagtaaacaagagcctagagccctttgctcaatgctggatttaatacgtatatatttttaagcgagttggttttttcccctttgatttttgatcttcgcgacagttcctcccacgcatattatcgttgttgccgtcgttttctctccccgcgtggctccttgacctgcgagggagagagaggacaccgaagccgggagctcgcagggaccatgtatcagagcttggccatggccgccaaccacgggccgccccccggtgcctacgaggcgggcggccccggcgccttcatgcacggcgcgggcgccgcgtcctcgccagtctacgtgcccacaccgcgggtgccctcctccgtgctgggcctgtcctacctccagggcggaggcgcgggctctgcgtccggaggcgcctcgggcggcagctccggtggggccgcgtctggtgcggggcccgggacccagcagggcagcccgggatggagccaggcgggagccgacggagccgcttacaccccgccgccggtgtcgccgcgcttctccttcccggggaccaccgggtccctggcggccgccgccgccgctgccgcggcccgggaagctgcggcctacagcagtggcggcggagcggcgggtgcgggcctggcgggccgcgagcagtacgggcgcgccggcttcgcgggctcctactccagcccctacccggcttacatggccgacgtgggcgcgtcctgggccgcagccgccgccgcctccgccggccccttcgacagcccggtcctgcacagcctgcccggccgggccaacccggccgcccgacaccccaatctcggtgagtaggagcgcgagggctggggcgcgtgagggccggggcaggggccgtcttgagccctgtcgagggcctcttgtttttccaccaacgccttcgttgggctggggatggtgcttcactacctcgagtttctagggaaggcagaagccagtgcggggctggcgacatcacagccccagaagaccggcttctgtggaaggggccgggcctgcccgccggggcctcttctgagatggtgtcagggtcggagtgcggcctccccgccatcccagacatcgaccgtggccgcgctgcgctgtgggtgacgcgggaggacagcgggctccctggagagccgggggcagcggcctgggatttcctcgtggaaggtgctggagattgctgagtttctgcgcccctttcctccccgcccgccctcgggcctccgcagggaactgattacaatggtttggaccgcagaccttctgggccatttggcggcccagctggaggatccctcggggtagctgatgattttcccgtcgggggtctcacaccgagaacaaaggagggatggacaaaggagacgccggggagatgcgcggaacaggagccggcactgtgcgggtgccacccggccgagcgcgtgggcgcatcatgcgggcagcgggggggggggcgcacacgcccggtcagtgtccgggaacatagggacctcaaacgcgcttgttcatgacacccgagttaaatggagactttgcagtcgcttgcacgcgtggagcctcctcttctcgcgtgggccagggttggaaataaccgttgtggtaggttccatgcagtgtttccatcggatgtcagacggggagggacggcaaacctgtctcaacctccactgattcacaaataaacgcagcgggatctgagaaggggcctgagtacacgggccgggggagaaagggaagtggcaacccctagttcaaaatgcaaacgacctctggaatttcgggaagagacggaggagtgagtttggattgagcccaccctgtgggggaggggaagcccaggcttgagaagcaaagctcgcgtttattgaccacctactaagtgctaaatccttctgcatttgttctcactttgaagagtaaaggctacccctgccaggtttccagtcttgggctggctccgagaagggcctaggctttgaagcgcttttaaattgtcctctggccctgggtggccagggaaggttcccgggggtgcagccaaatacacatcgccggcaaactgattaaccctgaaagtggcgccgaggcccggtctgtggctcttggtgttcccctccccctcacccctcttgggggagccagacggccacccccaggggaggaggggcccggccgagcctcgccgcgacttttgcgagatagcgcggcgacatggccacacaatggagcccgcaggcgggagtgcggggcggggcgcggcgccctggccttgcgcgcttacggggtcctctccagggccctctggggcctctgacttaaaatagggaggactgggccaggagatcgagaccatcctggccaacctgttgaaaccccgcctctactaaaatacaaaaaaaaaaaaaaaaattagcggtcgtggtggcgcgcgcctgtagtctcagctactggggaagctgaggcaggagaatcgcttgaacccgggaggcagaagttgcagtgagccgagatcgcgccactgcactccagcctggtaacagaacaagactacgtctcaaaaaaaaaaaaaaaaaaaaaaaaaaggactggtccagggagagtttgctttgtaaccccgacaatcctggagggaatttggtgtttggttaaggaaaagagagaagttaaaagtcatgagttacatccagcagtgtaaaaacgaaatacccgccgggcgcggtgtctcacgcctgtaatcccagcactttgggaggccgaggcaggcggatcacaaggtcaggagttcctggccaacatggtgaaaccccatctctactaaaaatacaaaaattagctgggtttggtggtgtgtgcttatagtcccagttacttgggaggctgaggcaggagaatcggttgaacccgggaggcggaggttgagtgagattgctccactgcactccaggcctggcgacagagggagtatgtctcaaaacaaacaaacaaaaaaccgaaataccatgtgaatgcacacagtattcagattttgaaatgtcagccatgccatgtagaggttgctgatgaagtgatgtttcccaaattcccatgtcagcaaatggcaagctgacctccctgtgcgtctctctgccaagaactgccacctgccttctctgggctcttcccggatagcttatgaagtccacagcctttgaatctggcctagagggtggtttttctcttctgcacccagccaagtgttttaggagaggtgcggctctctgtgagggaacacagggcatgttgaacttgttggcattcatagcttcagcgtgttatgcaggtggcacttacataaaagcaactgaaattaaaagcagtgcatgtggccaggcgcagaggctcatgcctgtaatcccagcactttgggaggctgaggcaggaggatcatttgaggccaggagttcgaggtcagcctgggcaacatagtgagaccccatccctacaaatcattttaaaaaattagccaggcttggggtggcatgcctgtagtcccagctttggaagctgaggtaggaggctcacatgagcccgaggccactgcactccagcctgggtgacagagtgagaccctctctcaaaaaaaaaaaaaaaaaaaaaaaaaccagtgcatgtgaatgtgctttttatatgttcttcccattacttgggctctcctacctgcctggcagctttagtgaggaccagcatcacatagtagctgaccctgagtcatggagggaagatgagaactgaccccagctttctgaggagttgccactgagccctaagatggccagacagtgtggtgggaggagcacagggttttaaagttgggcaaacctagattcagttccaggagcctcgtgtcatcttgggcaagttacttacctctctcggtctcacctctttttctgtaaaatgggatcatcataacaatttttagtgttgccttaaattagaaaagtaaggtaatacttttgaagaatttggctttagcccttcataaatgatggttattttattgaatagccactcactgtcatgtagagttaccaattttgctggtgtgcccaggactgagggttttcccagaatgtgggattgttcgtggtaaacctgggacagtccccagtgaacgcagattgttggacactcaatgtgaaaatgggtgcattacccatcgttgtggtttggtaatgagctgagaacaaagaagaaacagcagaggagaagcagctgagagcaaaggagaagcagcatcattcttccctctgctgagattctggaagtagtcatttaagtgctgccagcttcatttggtcttgaagggtgagtaggagtttgtcaggaaaagaaccagcaattttttaaaaaaagaaatattgaccattttataggaaaaaaaagaaagacaaagaaaaagaggccaggtgcagtggctcacacctgtaatcccaccctttgggaggctgaggtgggaggattgcttgagctcgggagtttgagaccaacctggacaacatagtgagaccacatctctaaaaaaaaaaaaaaaaaaaaattaactgggcatggtaatgcatgcctataactccagcaactcaggaggctgaggtgggaggatcgcttgagtcagggaggttgaggctgcagtgagccgtgattgcaccactgtactcctacctggagaacagagcaaagaccctgtctcaaaaaaagaaaaagaaaaagaaaggatatactctgctttactaatatgttgtgtagtaccatgaaataatacaatgcaacctggcctttgatttaaataatatatttgtcacaataggtaaaactatacagactaattaaccttaactcagaaactgtttttaatttcaatgaggagaaacaagagaacacttttttttttctatgtaactgctgtagttttaacaatatcttgccatagttcttatgttggttatgtgaatagggcaaaaatcaaaacaataataaataataaaagttaacaggggcctctgtaaagccctgaacttaggttggaagaaataagtgtggcctgactgcaatgtatgtgaactttaattcactccaagttccatatgagctacgaccctaagacaaatgttaaaatcattaattaggctgcatgaatggaattatgtgaccttactgagggcaggtacagagtcttactcatttttaagtgcctggcacatgttgggcacttagcaaatatttgcgtagggatcttggtggtaattgccccaggactctgccctgcctgggtccaaccacacagaatggctgcgtgagtcctttaagaagcaaactggagagccctaggggaacggtgggcaggatggaagagggttctggaaacttcagggaaccactggaggaaagcagggcttttaggctggagaagtcactgagtggatgaaagcaagatggagtatgactgtgtccaaatttctgaaaagcaaaaaaaaaaaagaaaaaaaagaccatgaccttttaactctgtgttagtgaaggtgagcagatattagatgtgagaagaacactcctagacaattgtggttgtgtggaaatgcagtatagaatatggcttgtcttcatcataaactcctgggcgctggaagcacttgtggtggagctctgcggatagttcttgccttgcagggctaggataggatctgcatgtgcctgtgaaacggacgtagccggagaacgtagctgtttccttttaaagaacccagtcacggtggttacacgtgtatctccatatggcaaaattgtggagctgtgctcttaaaatgggagtcttttattgcatgtacattacacctcagtgaagctgatttttataccagttaatgcttgtgagtacttaaggctgaaaaggagaccgaaatggaaatagattgtaaatatgccttgacggatatatggtggtaggtgttactggaaaggctaggaaaatatatttaagtatggaataacaattattttgtgtaatggagacataagcaattatgatattctccaaggatttcaaaaagtttgaatcatttttagagtcgataaaaataacaacacaatgaaatacatgtacagtatatcactgtgttattcaaacaatttatttaaaagaagttttgccccattagggatggagtgggggcattcaaggtgttctcagagtttttttatggtgcaggtcagtgaaaaaccccgaagtgttttctggatcttttgggacctgcttatcaagtacgctagtggctttcaaagccggttcatttgtgcagggaactttgtgagactggagaatgatttgtcgatcttcaggaaaaccaaagttgtttaactttccggttaccaccctgagcaggtcagtcagagttggggttggtctgtggtgctaagctgagaacgaattaaataagaaaggtgtgttggggtggccaggggtgtgtcactacctctagtgagccctgtcacttgcccagttgtgtcccatcaaaaggtcaggccacatttgctaggcactttctaagcactcaggtggaatgatgcccgggagacagttctagataacgctttattctgtatccctccccatttcttttctaacttaaatgcactaagaaaacaaacacactgaggtgtggggaaacaggaactctgatacctgtgggtgggagtgtaaatcgctctgacctttatggagagtcttaggtgtagtagccataaaattgcaaagtagacagcctggactccggaattttcacttctagggatttgttccacaagcacaccggcacatattaatttcagcattgctcgtaataacaaaattggaaataatctaaatgtgcatccttaggggaatgtttttatgcacgtggcacatacaaaccataagctatgtaggcaagaaataatgaagttcattatctaatgtatggaatcctcacaaagacatttataaatgcaggaagtgtatatagcactttactgtttgtgttaaaaaaaagaaagaaaaagattatattcacttgaaaatacaaaatctcacaaaaaatttgtaacacagatttgcctgtggggaggaaagcgggtaggtgagggataatggtagaaaagggactttcactatgcatgccttggaactttttgaattttttaaccaccttaatcatttttatactcatttctgtgccttattaatccatttaataacaagaaaatacatttaacatacagggaagttaaagttaagtttaatgtaaaaatttcaaatcatcggctgggtgcagtggctcacacctgtaatcctagcactttgggaggctgaggcgggcggatcgtgagatcaggagaccagcctggccaatgtggtgaaaccctgtctctactaaaaatacaaaaattagctgggcatggtggcacgtgcctgtaatcccagctattcaggaggctgaggcaggagaattgcttgaacccgggagttggaggttgcagtgagccgagatcacaccactgcattccagcctgggcgacagagcaagactccatctcagaaaaaaaaaacaactcaaatcatcttagccacttttaagtatacagttcagtagtgttaaatacctttgcattgctgtgtatcagatctttagaacttaaactctgcccattaaaataccactcccattcctctccacaccagcccctggtaacccccattctattttctttttcttatgaatttgaccactctagggacctcacacaagtagaatcgtacagtgtttgtcgttttgtttctggctaatttcatttaacataatgtcttcatgattcatccatgttgtagcatgtgccagaatttccttcctttttaaagctgaataatgttccattgtatgtgtagaccacgttttgtttatccattcatccatggatggacacctgagttgcttctccgtcttggctactgtgaataatgctgctatgaacatgggtatgcaaatgaaaccttttgaatttggagaatgtgactatattacctaattttaaaaacatattaaactaattaagttttaaaaaacagatacatgatattcatgaatcaacctgaaagtagcatctttttcttttttttttaaagaagattctctatttagtgtttatggatgcacaggaaaactgctttaaggcataagttgttttttattaaatttgtcttttacctattcttttacaattttgggggttttcctttatgctcaagcttcctcaagattcttcaaggcagatcaaaaccatcctcagtggcaatcctgtatttggcttttgattttgcttatttcacaggaggttgctttactgagagggggaaatctctactcctggtctcagtgctggtagtggatctaaatcagcaatgggcggacaccccagccccacactactgtggcttccccacttgtgggcacaaacagtcacgtactaggcaatggtgacctctccaggtaggcagttttccctcaggttatattggagttagaacctgcctgaaaaccactaaccggctgcagcggtgggattgtgtgaagaacaagttaccttcctccagggcaaggtgattcttttaaacaaattttaagacaatttagttgtactgaatttagagctgaagccagttgcaaatgtagctgcttgtgtctgcataagaaagaggaagtatgctagttttcctttccttgttccagaagagggcagttcttgccaacgcgagctgctgctttaagaacttgaagcaacttttctgacatctgaaactatttgtcttttgggaacttatttgtcctagcctgcctgcagaaccagctgttaaggctctgttgggaaggagtatcgctctgctatattgacctctggtagaccatgacatggccccatatgccatacaacataaactggttactaagagtaatttaatggctatctctagagctactcttttgttaccttctaaagaaggcagggaagaaaatataaatggggttataataggaataatcttgaatctgttttaatttatacaaaatacatttataagttttggcacattcacgtttggatactggctaacaactttttagcgagagtagcctgtatcttgcatgtcattccattgaacagtaaggtggatccctgtcaatgaagaaatcatctgatgccagggactttgaagtctttctccaagaggtagatacgatgatctctgttttgctggaaagaaagctgatacccagaaagagcctgtaatctcaggtccccgtgggtagtaaacagccctggtttggaacccaggtaagtccaacctgcaggattgtactttccccctttccccacactttgtatttgccaaatctgatatgagggcacttggctcttcagaaccagaagctatgtgtgattgaagggctctattaaaccttaggattttccatgacttgtcgctcccatccgcttcctctccccagggtagcttcttgtctgagtttccgtttgcttcccaccaatcactgtctctctaggagcaatgtcgtcctacggaatcttccgtatcattcctcaactgtaagctctgcagttcaggaatgcaatgttaggaatcccagtgttgcacaaacttcctttctagccgttggattctggtgtgcagagaactaaagagacttcccaggattcagacccttccaatgggaggattctcctaactctaggggaactgttggctgcttaagagcaaaaccatatggctcactcaaaaatccctttcctaagagaaatctataactgaccctctgtgttcccttttctctgaagatttcaaatatatttgtggtaaaagcagagaaagaagaggagaaaatcataataaaagcacaataatgatgattttagtaaagataagaatggggcatggatcaagacaatgactaaaaccccaggcaggaaaagccccgtggaattggtctgaactgaatgtagcagcccatcagtggaagttttcttgtttctggcaggtggcctatgcttttatctattactgctctgtaatcagaattgagccacgatattcaagtttcttatctgaatgatgggaatttggttttctggccttctgcattttgcaggagcccaagaattgacctgatgttttaaaatatattttccctccaaaggaggagtaaaatccagacaggtgggccattctgtgtgtttaaagtcattgaaaagcctctgcaagtaaaatttgaggctgtctgtaacccacattgaatagttacagatatattttattttggaggataaaaaatcaagaagttactaccacaatttggtgggaattttgaattttggagttttcctttgtactcaagcttcctcacgattcttccaggcagatcaaagccatgggttttgggatcccctaatcgcaaatccagttttgcttcttaaaatctaatcagtccttaagttattttttaaatcttcctttctactccccagttgaaatctccatttctacttctagaaatccagtcaaaccttatcgcctccatttagaactgatcgatagcaactggtgagcaggttaattataatcgcagaataaacgctgaagtctcaaagttcaccacttttgcaatgtttccaaacccctcgggaccatgccaggaggcgctcattgacccattccgagcaggtgtgggagtttgaaccaggggcagacaatcagatctgattcaaacaactcaatttggttgcttatctagaggttttcctatcttatgatatctgtcattttagataaaaaagagttcatcaattgagctgggaaatggcaaagttacattttattctgataaaagtttgctagttgttgttttatcagcttgggttgaaattgtgtctccgtcaaggtctgcaatgaccttttcagatattttatcaggtattaggtgggggagtcctttttttttttttccttctttgacctagaaaagaatgacctgacttccaagatcataaatcaaaccaggtaaagacaggcaataatacaggttgcccctcaaaattgagtaggcggggaaaacaaacaacaaataaaacctttccctagcatttggggagaacttaacttgacccgaaataaagaatgtagttcccacggagtgcacagatgtaggaaaatactgcttattttaaaaaagaaaatgctttccaggcaaaaatggcttcagagaaacacgtagtaattttttttcaagtagtataagggaaacttctttattttatgaaactcaatgtatatttattatagaaaaatggaaaactcacataaaccaatgtaaaaataattggtaatcttaccatccaaagataaccactgttaggcattaatccttgacttccagttatcctacatacacaggtatgtgtataactacattattaagtagtcgtgcaagttactgtttaaagtcatttcagcactgatggcaatttctgtaaaattagtgacccagattggatccttaaacactgatgccatttttaaataaagcagaaatgagaaattgaccagcactgtcaataacagctgaatggaagagttgggtgtaaaaacatattttttaatcttatggtatataatttatagccactttaaaactaaagcatatttgtaagttttaaattagggtccttgaagcgaggtgcccccaggacgtgtgatttactaggcctcactggggaatgggagttgcagcgctgaaatctgctatttgaaaaggggtgacccaagatcccagcagccgcagggaggtgaaagcacattggtctggcgcggagaaaccctgggctcctctcccagacccttctcttcctgcggtgtgactcactgcctctctctgcttgtgtggccatttgtaaggtgaagaattcaggtcaggtacagcaatggtgagaaggactgctctaccgccctttggagatgtttaaaatcgagtgtcttccggcatgccccgtgatagtcattcaggctgactttgtctttcccggtaccacagaggccacattaacattaagccttcctgtgcctgcgtggacatcaaactcgaattcatgcttgcctgtgtcaggtaggtttccacggctgcctgccttgttttaagcaactctgtgaaatcttgggtttgatggactcatcttttctttttaccttttattttagatttgggggtgcatgtgaaggtttgttacataggtaaactcgtgtcacggggatttgttttacagattatttcatcacccaggtattaagccccagtacccaatgcttatcttttctactcgtctccctcctcccaccctccactctcaattagataccagcatctgctgtttccttctttgtgttcataagttctcatcattcagctcccacttatatgtgagaacatgcggttagtttcctttcctgcattattttgctaaggataatagcctacagctccatgtatgttccctcaagagacctgatctggttttttttttatacggctgcattgtttttcttatgcaaagtgacctcaggtgctctgagtttcctgctgcttgggctttgcttttcagttaataaacccactgagtgttgtctgcaggtctaggcagtggtggagatttcatagaagttcagctcccttcacaccccagctccacatgcgtgatttgtttcatccatccaccagccaataaatacttctccccattccctgtgagcctggcgctggtcaggctgtaaagatacaaaatgaacagaagtgtctccgaatcccagcaacttagagcttgctaggggagggaacacgtggatgtgcactcttaggggcaggggatctgaagcgcaagggggcgaaagtgggttctacggagcccttaggataccgaaactggcctgggcgcctgaagtcaaggccaggcttcctgggcaaggcagacttgtggcatcctaaaggatgagtaggcgtttgctgcctataggaaggccattctgagcccaggacttagcttgaatcaggctgttctgcagtcccgagtggagggcgcgaggcaggaatgcaagcagaagcacggcgttgagggatgttagaatgctggaaaggtgagcaggattcgagcagcacttcagatatagcgctttggttatggtataagaaggcgcaagctcctggctgttggttttgttttgcacccaagcagggtgatgagcgcctcccgctgagtcacccatttcccatcggagaaggaactctggttaaaatgaagccgcacgctacaggccagttttggaggatttatgtggtgtgcttcggcagcagggcacggcggctgtgtggtttgagttcaaattgagggccaagaggggacaaaactcaagccaattttagtccccaaatctggagccctgccctgggaaggaagaggagtgttcgtctgacccagaaggtcaagcatcttgtaattctgccctcttcttgtactttctctaaaggtggtgggatgacataggattacaatatagataattacaggggacaatactatgatgcaaggatggattgccagaccctgtagggtggattcacctacctcccaggaggtgtagaggtgaagaggaagggctcagatcaaccgatctttctttctcatttgaacctctctcactttgatccatcacccttcctttaattttaagttcaatttctaccttttaaataggttaaaaaacatttttttgagacagactctcactttgttgcccacactggtctctaactcctgggcttaagcgatcctcctgcctcagcctcccaaagtgccaggattactggtgtgaaccaccacaccccacctaaataagttttttaatgtgaaaaatttcaaacataataaaaatagagagtagaatattcatccctcagctttgacaaatatcatttcatgaccagctgtttaatctatacattactcactttcccccacacagtgttattttgaagcatattccaaacagcatgtcattttacccacaaatacttttgtatatatgtctgaaaagtacgaggactcttttattttaaaaaatacagccccactgccatgttatcaccctgaaacaaattgtcactctttaatatcattcaatatccagtcactgttcaatttcccagtttgtctaattgtctttaatgccttgttccaatcaggatctaaatgaggtctaagcattgcctgtgttatgcctgttaagtttcttttaatctatgggtttctctttcatctccttttcttctccttgcattctgtttgctaaagaaatgaggcttttcccagaggacttctgcagactggattttgttgactgccttctcttcatgacattgaacatattcctctgtcccctgttgctcatgtaagtctgtgatgggaaaaataggcacactcagattcaagtttgtgatggcagcagccctggatgctcattgcctagaccctttactttgttaggcattgctaatggtaatattctactgccaccattccttcttcatttgttagctggaattcttctatagcaacaagcacatttttagcttattgaatatttggttacttggaggtacagtttgtctaggaaaggcaggatacatgcctgctacagtcgctttacttttcattgttcaaaagaacaaattagttctctagcatccttcaacaattaccaatgaaatgaaattgttttcagcatgattaagaactcatggacttcagctgagtatagaggctcatgcttgtaatcccagcactttgggaggctgaggctggaggatcatttgaacctaggagtttgaagccagcatgagcaacatagtgagagcctgtctctacaaaataaataaataaataaataaattaggcaggggtggtggcatgtgcctgtagtcccagatacttgggaggctgaagtgggaggattgcttgacctgggagttcgaggctgcagtgactcatggtccaaccactgcaatcagcaagaccctgtgttaaaaaaaaaaaacaaaaaaacctcatgggtttaaacaagcatgatgtgtttctatccatatatcctgattgatgttcagattgtcctatctttgctagagggaacttgcttaaactgagctcttttgacaaaatcttagtttaatagtttcttgctttccatcctataaaatgtcctaatctctttttatgagttttctcttgccaggcctggatttggccatttgccccaagaaacctggctcctgttagtgaggaatggcgtttggagatcaatctcagagctagctctgccagctgggcttattgctattgggttagtcattcaacatgcagagtcaggaaatacgtacccctcctaccccaaagataagataaaatacagcatgtcttcatactgatgctttcaattcaaatttagggctaaaaggcttttacttgcttcattcatctttttaaaaaaattatcttaaactatacataagataaaatgtaccgttttagccattattaagtgtacagttgggtggcattaagtacatccacagtattgtacaaccatcacccccagcagtctccggaactcttgcatcttcccaagtgaaactctgtacccattaaataacgtctccgtatccccttccctccagcctcaggcagcccccattgtgctttctgtctctctgaatgtaactactttagttacatggaaggacacagtattctcttgtgacgggctcgtttcctttggcatagtgtcttcaaggtttctccattttgtagcatgtcagaatgcagcatgtcttttttttttaaggctgaataatattccattgtatggatcgatactgtattttgtttatccattcatccctccatagacaattgggttgcgtctgcccattgaccattgtgaataatgccgccatttttacatgggtgaacaaatatctattcacctccctgcttttacttctttatggtatatgcccaaaagcggcattgctggatcctagggtaatgctatgtggtttttagggaccatcatcccattttccagagactgcaccattttatatccttcatggcatctttacatctgtcagtctttccaaaaatcccattctcaacatctccaacgtaattcttcattttctgtatgtcataacatcctcatctctgagtaacaataggaacacttcaccagcagtacgagtcctgaaacccgccctgtgttgcttgccttgtcttgccttttgacattgggctcacctccagtgtttctagctgttggctgtgggctcctcatcaccttcgtgagctggtggcacatgggcaggcatgaataaataagtgccttagggacacatgcacaaagaagtgtgtgtgtgtgtatcaaatgcattgcccacatggaggctgaaggcagagtcttgagagaggaggcgatcagaggcctaacccagccttgggagtgagtgggtgatgacagaggacatggagggaaggaaagtcacaggccaaatagggaaggaaggccatgggggagccagtggccatcgtctttctcttgagctcctgtagccacagtgtgaagggaagagctgtatgtgtaagacgccttccatgtgcccctcatgcccgcagtgtacacgggctgggggtgggtcatcctgacgttgcccgctcaggggtggccttcacgtttgcttcaccgcctttcattctctgctgtccttctgtgttgtcatggaaggagtcacgctctgtccttggagcctcgtgcgcagcccatgcagtccctgtggggctggggtagagatgagggaggagggataccctgtagcaaatgggatccggtcatgtggcccaggccaatgtcatcatcctccccagcagggacttagatccatgttttcccaatagctttatttgctgggtggagaaagtctggaggaacttttgaatagggagttgagtacattttgagtaggttgtgaaagttaggaaagactgtctcacccccagtcctgttgaagccccgtgcatcacgcaagggctggggaatctgattccgtactggcccccaccttcagaagcctccggctccgggcacacgctgggaagtggatgccactgccagggagggaacttgcagaaccgaaggcctctttttgcctggtttcctgttgggagaagagcaagttctacagtatttctggagagtgcttgggttttactgcgcaggctggggtgagtcttggtcttagtggggatggccaaggttcgtgaaactcctgcccctcgctcttcactctggaggtcagacttgctgctgcctgcctgtcgtggcagggaagagcgtggacccagcagccttggctcacagcgagtgctgaccctaagccattattactcggcaccttggcaatccatctggtactgatggcctcaaagagggaagcagaaggtgcatcttgcaagtgcatgaaagccagtggcgggaaaggggcctgggcccggggggtggggtggcttctggcctctgcatctctgtgtggcttgtctctgcatgcagcttttgactcatctccagccacaattcctgagcgtcagcctgtggcctctgttctcattctaccttctggtgctgtccttttatttggattatagttccactagcctggaagtattttcagggcaagaattatgccacatttccttctggggtccggaataccatcacctggtacatacaggacacatgcacgtattccttcacagaaaagatgcagcccggaatccatcctgaagcatttggcagctttggctcacatattcagacctctgtgaaaggctctgctgagacatcttcggcgggagcggagccatccttgtaaaaggaacctgagaaacagaagcccagggatgagcccatgtggatccctggccagttttacagggagaaggaccctgagagacgccagggagactgaggtagcaaaggcgcccaaaacctagaaggccaggaagcgagagaagagcgcagaaagttctaacattatgttctcaaaggtagtaacacgggaacagggcagtgaggtgtggccaacaccggggacctcttgggtctgaggcagggagaaaggtgcaggtggagatgtcccagggacagggggacaggtggcagtggctggactctgagggctaagggctggtgcacatgtgggatactccagtctctgtttgaacccttgagagcaggagagagcccccaggggagtgggggcggtgcagaggggtggaggaggagctctgcagagctgccttctgatgcagttggaggccttgggaggcccagagccaggcaagggagatgaggaagtggataggcgtgtgcccccgtgtttgcctgtagacaccccttgcatcctcacttgatcccttgatgctctgctgggccctgatggtgccctcctggcttccaaaggccccctgccatctttacattccatcagtgttctggacctggagcagatgactcacaatctttccctgccagcttgcagagacttccggagttttcactcatctagtttgtcctttcccatcttgggtgcctcagcccactgtttttccctccaactcactttgtgtagattctccatgatccttcctggagagccccttgaggcaccaggagagctgtgcgtgccagccatgcctctcagcctcatcataacaaacgtcacagggaaacaagctcccttcagaccctgtttaaaggcgtttaaaggcggtaagtgcctgtcagtcttggaggatagtgactcactgcctgaaaaccttcacagaagtgacaagacacttttcttcggggaatgttgatattgagtttcctcccctgtgtaaacacatctccaggagtggcattaataatggggaccctttccccaggacaaagcagaggatggggggagaaggaagaggagaatggacccgcctgctgggaaggggggagagctggccatataagcagctgttcctggtgaagggggagcccattagccagacccttttttcatttgttttcagggattttgcttataatctttatggggaccgccaactttttatttgacagttgataaggagaggcactagagtctagtaagtggttaaagaagctggagtcaggcacctgatttaaaattcctgctagcctgggtgcggtggctcacacctgtaatcccagcgctttgggaggctgaggcaggcagatcgcttgagctcaggagttcgagaccagactgggcaacatgatgaaaccctgtctctactaaaaatacaaaaaattcgcccagtatggtagtgtctgtctgtggccccagctagggaggctgcggtgggacgatcacttgagcctgggaggtggagactgcggtgagccgtgatctagcctgggtgacagagtgagactctgtctcaaaaaaaaaaagtaaaaaaaatccagctttaccccgtataatgtcacccagttttcatgcccataaaattggaatggaaactactccatagaggctaagaaatattattcataaagcatagtactcggcatgtagtaagtgtctataaatgttagtctgcatttacttatttatttatttagagatggagtttcacgcttgttgcccaggctggagtgcagtggtgcaatctcagctcactgcaacctctacctcccaggttcaagcgattctcctgcctcagcctcccgagcagctgggattacaggcgcctaccaccacaccagctaatcttgtattttcagtagagatggggtttcatcatgttggccaagctggtctcaaattccttatgtcaggtgatccaccgcccttgacctcccaaagtgttgggattacaggcgtgagcctctgcacccagccaaatattagtcattaagccaaccattaataaatgctattatcattaaaggaaatattgaaaatagtatcttttttgttttatttttggttttgtttttgaaacagggttttgctctgatgctcaggctggagtgcggtgctgtgatcatagctcactgcagccttgaacttctgggctcaagcactccgccttcctcagccttctaagtagctgggactacaggtgtgcaccaccatacccagcttttttttttttaattatcattttactttctgtaggggcagggtcttgctctgttgcccaggctggagtacagtggcatggtcatggctcactgtagccttcaactcttgggctcaagcaatcctccttcctcagcctccaaaaatggtgagattatgggtttgagccactgtgcccagccctggattcaataccataaagggttagattgcacaggaggctgccaagttgaattaagtggggttttatattagtgagaatttgccttccttctcagtattaatctacatttaggtcatagaccccatatccaacttactgtctataatttctcttacataggggggcacatttagataagcacagactaattggggttatagtcatagctttagaatagtttaaagacctagctgacggccaggcgtggtggctcacgcctgtaatcccagtacttcgggaggtcgaggtgggaggatcacttgaggtcaggaattcgagaccagccgggccaacatggtgaaaccccttctctactaaaaatagaaaaattagccatgtgtggtgacaggtgcctataatcccaactactcaggaggctgaagcaggagaatcacttgaacctggttgcagtgagccatgatcgtgccactgcactccagcctgggtgacagagcaagaaaaaaaagatctagctgagggagttgggaccagatgattttctccagtgatgtttgaacaaaaagaaaaaatgcagctgggcgcggtggctcatgcctgtaatcccagcactttgggaggccagggtgaacggatcacgaggtcaggagttcaagactagcctggccaacatagtgaaaccccatctctattaaaaatacaaaaaattagccaggcgtggtggcatgcacctataatcccagctacttgggaggctgaggcaggagaatcatttgaacccaggacacagaggttgctgtgccactgcactccagcctgggcaacagtgcgagactgtgtctcaaaaaaaaaaaaaatgcagaagctacttaggttgaacacagaaaggaagaaggactgtgtagttcagtagtgtgtgttctgagaaagccctcacagcgttggtctctagtaatctctggaaataagtgaatcattccagcttgaattatcatgatgcaaaattgtgttcgctgaaaagcaggggttaagtccgctgccttgtgaatttccgcctggaaatgcatctgacccatggtggttgctcaattctgagtgagtttggagaaggaaggaaaatgaggagttacttattagttagtcgttatacatttttggtttttaaacccaatatataattcctggatattcctaccacttactatttgttgtcgttgtttctattgtttttgagagaaggtcttgctccattgcccaggctggagtgcagtggcgtgatcatggctcactgcagtctttacctccagggttcaaggaatcctcacacctcagcctcctgagtagctggaattactaccatgcccagctaacgtctatattttttggaggtagggttttgccatgttgcccaggctggtcttgaactcatgagctcaagtgatactcctgcctcagcctcccaatgtgctgggattacaggcataagccatcgtgcctggcctcagtgagtggttttgtgggctggagtaaggatccagctgtcttcgctgcaggagtgacagggacgtggtgtccatctcagaggagccaagtgggcttgcctaggctttcgattcttgtgaagatgagtgaactgaaaccagacacctcttagatctatgggcccttctacctctgatgatctgtgagattcagtgaaggtgaacagtcactgtcggggatgttttaatgattttactaaaaatcggaatagaatgtgaaacagggggatctgaagagtgattatttgtactgttctggtcaggagctgggagctttgtctggcctccacgtaggggcctgaggacaagaactaggcagaggtgcagacagcgaagaggaggatggctcctgggtgttcaggccatggccagcctggtcagcagagcagctgtgggaaaagggatgatatttggtggtagcactgaggcccagccaacactgagcgcttaggatgtttcctgctgccctggcattgttttgttatttattccagcgactgtcctgtgggcaggaactgtaatgtccatgggcaggagaagaaacccaggtcacagggacctgcccaaggccacagaaggcccgaggctggcgggacctaggtcagcctgacttccccggccagtgccctctctgtttgtctcgtgtcatctgccttgggagctcacatttcagggcatgtggcccagtgcccactgaggtgcagcccgcgtgcctggacggctctgtcagggcgagcttctcgggcagtcttccttccctctccatttgttgctgcaggattctcctttggtcctgacttttctggtttttcatttccttacctgtaatctgttcactcttggtcagcaagagaataatattgcagctaccactgcctctgagtttcctcctggaagactgagtcttatgaagacccggttttgaggagtttcctggctggatcagcaaaaccacagtgatccacatttgattgatgtattttgagtttacatttattcccaatgtttattttcttgtaaaaatgagcgcattattgattaaaagagagagacacaatatccaaaaggtggaagtagcctaggtgtccatccgtggatgaatgaatgaacaaatgtggtctgtgtgctcagtggagtattactcagccttaaaaaggaagtcttgcactgctacaacagatgaatcctgaagacattacgctaagtgaaacaagccagtcaccaaaggacaaacactctatgatcccacttctgtggggcccccagagccgtcaaattcatgacgacagaaagcagaagaggggttgccaggtggtggggccaggatcggggtgcgggaggatggggagttagagtttaatgggtgcagagtttcagttttgcacgatgaaaacagttgtagagattagtttcacaacagtgtgaacacatttactatcactgaactgtacacttaaaaatggttaagatggctaattttatatgtattttatcacaatttaaagaagagaaaaatggagaggcagtgtacaagcttagtaagtagaaagtaaattgtgaaaacctttttcctaacacttcattctatttgcttctttggccaaaggtgtaagtagcattgatggacgattaggtagaactagccatccagaattggttctacaagattgcctttctggctcttcagtgtttctctttgcccaagcctcagtgttatcctgctatcacagcagggctgatcactaaggagaaggttatccttggtgaggaggtggaaaatggtgatttttaaatgttgtactacaagcaaccgagttttgatctgcaaatctatcatatttataatctgcattaaaattttaagtcacattcataaaatataggagtggatgcacttttaaaatttctttggaatgcaaatcagattggattaaagctattaaccatgtgtaataaaagactgtagattttgtagcagcttcatgctctacctaagatgtctgccaagtaagtgaaatgtatttgtaaaaaggcagatggaactactagacgtattgtcatcgaactattctccaggggcactgatttcagtgcaggtgctttagatgggaggaaggctgagagcagggtctgtggggcccctattgcagagaagctccgtttcatctactttatatttgatttgtaaatgtttgatttgcttggctaaagaattctgaggctagagcaacaaaacaaaacagaaggagagaggttgggaagaaaacgtgaagtaacaccaaaaaactaactgctattgcaaaacaaggataaaatagataattcaagatagatgtgattgattgccataaagattcatgaacacgtcaggtgaacccgagtctggaggctagaggaagaggagccgacggaatttgaggaggatgtgtgtctggtctgaagaggaggtagagacttcctgcgaaggctagcagagtaaaggtttgctttctccctttcctccccgaagaccagcacatcagatgaaaagaaccccccaaatcaagtaaaacttttatctgcagtgaaattaagagataactcatatccccaactatagaaaactgccgaatataatataaatccagaccacatggagggaaagacttcgagagctggtccatacctctcagctctcctgcctgttcgcctcccaaatgcccaacctccaaataccatcacatgtgggttagggttgccaggagtaaatttccttgttaataaaatgaatgagataggaaagaaagcggcaatgttttcattatttgcagataaaatactggtcaacttcactaaacaaatgtaaattccctgtggagggagctataaagctttactgaagggcataaaagaagacatgaataaatggagaaagatactagatccttggattggaaaagttggcagcattctttattccaaactccctcaaacaaatctataaatttaacacagtctcaggaaacatcccagcaagatttcttaaatacaacgtgtccagctgattataaaatttatatgaaagagttattgtacaagaatagccaagataattttttaaaaggagacttaagaaaggggaacttgccttatcagaaatcaaaacaaactagagacacactggcacggaagctaaagcagtgatgttcattgcagccctgttgtgtgtagcagtgaaaaattacttgctgaaatgcagccaaggtattaggaatggggaggctgtggcataaaaagattggcattagcattgaatcctttcaaatatcatgtacagctaaacagctgtgagaattatggagtagaatgtaagtgttatgtgccttaacaatgccaaactaataaatcctcttcgaagagagaagtagatctgtgctgatatggaaaaatgtctaaacagatatgcgtccctgcagaaacagctgcagaggagtatccatggtatgatcccacgtgtgttcagcacactgctctgttctttcctgtactgagggagcccatttctggtgaggattatttccaccaccccgatgacacaggcttggctatgagacttgctttgatcaagaatatgtgactcgaagtcactatgcaacttccacacagaggcattaagagccattacgtggttctgtcattactttttgccccctgccacgaggctggcatgaaccacatagaggttttgccttcggcctgcatgtccaattgaagcatacatatagaatttcggccaacttgcagctgacatgtaatgtgaacagcaaacaaataactatttgtttgttacagcataacagcttaaacagcaccaaaccaagcataagtgttttatacatatacatttgaacatggctaaaatatatctcctatatcctagatacacttttctcatgtgtataaacagacatgtacaaggatgcctgatgaagcattgctattacagcaaaaaactgaaaacaatctgaatatatatcagtaagtgtcttagccagtttaggttgctgtaacagaataccatagaatgtgtggctttaacaacgcttatttctcaaagttctggaagccaggaagcccaagatcacggcactggcagattggtgtctggtgagagacccaagcctgctttgcagaagaccatcatctcactgcatccactcatggggtgggtgtagggagatatctattctgtcttttcttttcttttttttgaggcagagttttgctcttgttgcccaggctggaatgcaatggcgcaacctcggctcactgcaacctccgcctcctgggttcaggcaattctcctgcctcagcctcctgagttgctgggattacaggcatgcaccaccatgctcggctaatttttgtatctttagtagagatgggggggtttcaccatgttggtcagtctggtctcgaactcttgacctcaggtgatccccctgcctcggcctccgaaagggctgggattacaagagtgagccaccgtgcccagcctctgtctcttcttataagggtactaatcccattcatgagggctccgtccgatggcctgttcacctcccaaatgcccaacctccaaataccatcacatgtgggttaggattgcaagatctaaatttgggttattcacagacgtttagtccataaccataaagaaatgaacaagtaaaatgtgatttattaatataatggaaaactgtaaatcaactcaaataaagcagatccacatgtataattaaaactgggaaacataataggcaaaaaagagactggaattgtgggttacacagaggcatctactgtatctgcaatgttgtatttctttaaaaacatctgaaggaaatatggtaaaacaaagatttgaaaaagctggtggtgggtttaagagtgtttgctatatatttttttctcagtgactgaaatatttcatattttttaaagaaagcattcatgtaaatctttaaaattgcaaagcaatgcttatgttcttcagaggaacatttatccctgtgtgtagaagtatatagattaattggaaggatatacactaaattcaatatagtgattggatagcagatggtgggggaataaacagaattgttacagtgtcctttgtgtttttatgtaattttaaaatttctaaaaataaaaatgttaattaatgcagtggaagatatctggaaaaacaggaaaattgttagccacctctgcccctggagatgggatcatggtgatggtggagactttttgtttgtttgtttgtttctttctttctttcttttttgagacggagttttgctcttattgcccaggctggagtgcaatggtgcaatctcggctcactgcaacctcctccttccgggttcaagcgattcttctgcttcagcctccccagtagctgggattacaggcatgtgccaccacgctggctaattttgtatttttagtagagatggggtttctccatgttggtcaggctggtctcgaactcccgacctaaggtcatccgcccgcctcggcctcccaaaatgctgggattacaggcgtgagccaccgcgcctagctgagaccttttgtttctacgtgacattcttctgtaccgtttgcctgtttgaaaaaaaaaatttttttttgagatagggttttgctttgtcacccaggttggagtgtggtggtgcgatcataactcgcttgcaggcctgaagtcccaggctcaagtgatcctcctacctcagcctctggagtagctgagactacaggcgagggccaccaagcccagctaattattattttatttaagagatgtggtgttactatgttgcccaggctggtattgaactcctgagctcaagccatactccgacctcacaaagggctgggattacaggccagagccaccatgcctggcctgtttgaatttttgtagcaattaaaaattgcgtaatttaaacacaaattgaaggggacagggactaaaaacataaatgagagttagaatgcagtgccacgttgaatgctttcacaggtaggagcctagaaatcatctgttccaactactgcacttttgagttgtggagaccagaccaagagaggtgaaatgactgttggctaaggcgtccacctctacttgcgtctggaattgcccctgcctctgcctttaagtctggtctgcgtggcttctgatagcgaagccaggggcggaccccgttcactgcatcaggagagccctgagcagcgcttggcaggaactctgcagcccagggcgccctctagaggctggaggaccttcgtcaagaccccggggggtgtggatgtggacctggaggagtggtgggcagaaggcggagccaccctttcacccagtcaattgcattcctctgtctttaatgttgggcttcctcagattagattttctttgaagaaagagttctgcagcttaaaaaaaaagtgacagaagaatcactggtgcagagtaaggtatagcgttagcatttgatctgatattatctagattcttttcacactaggaagcacctaagtcatctggtctaacaccttccttttacaaagaagatctgaggcctatataggcaaaatgtgtgctgcccaggtccacgactgcagggcattgtctcctggccctggtaatgtggtcttcattcttattttttgttttgttttgtgttaactgaacttagaactaaacagatcccttgcaacttggcttagactccatatttcatgcaaaaagctttcagggtagcagggtgactcggtggattagcaggagaagaagatgtaaagtgatggcgattggagcttaacctcggtttgattaagtaatcccccagacacccccgagaggggaaaacagtccccacgtataaatttctacacccttgctcgcctcctcttctgaaaggcgtaaatctcccctgaaatgcctccctagcattcagggcaataaagaggtcacattatatctccataaatctcccagctggctgctgctgctgccattccagaggcgaaggggaagttgtttcctcctgacggcaggccatgggcctggaaggaaaagcctctccctgcagacccattgtctcggtccctgagggagctgccctggcaatttattcaatattccctttccgtcctgccagctcctaactggggttgcagagtcaaatggcccagactagcccagcttaagtctcctctggccaaagctccattgcaatcttcctaataaataaaagaaaccaggaccatatcacagcattagaagccaggccagggttccctggggctgaggctggggctcgctgggacaggagctagggtgctgtgaaagatgacagcgggtcaacagcttcaggagtgcagcaaagctgaggacccacttgggaaatgggttccattttcccattagggaattaagatgcttttgtaggaaaggaaggtgggagaaaagatgcttttatggaaaaatctgaaaatggaacctgcccagctttaaattaaaaatgttactgcatgaaagagtgatgatgctagcccctgacatatttatgtattttatttaacatgcaaaataatcataggacagctatggtggcgcacgcctgtaatcccagtgctttgggagcccgagcctggcggatcacctaggctcaggagttcaagaccaccctgaccaacatggtgaaaccctgtctctgctaaaaatacaaaaattagccaggcgtgatggtatatacctgtaatcccagcttttggggaggctgaggcaggagaattgcttgagcctgggaggtggaggttgcagtgagccaagatcatgccattgcactctagcctgggtgacagagcaagactctgtctcaaaaaaaaaaaaaaaaaatcactatcacaaataagaaatacattaacataaacatagttgagtatttaaaaggtacacaacagcaaacaatgagaagtccttccgtgagccaccaagacacctccctggaaacaaccagcatgatcagtttcttgtctgtcctcctaaaaatgttcattctgtatataaacaaatccatgtatagattcttctccccttctttttgtaagagaatatcaatgtaatgtccatgccttctaatatttcatagcatatactgcaagaattccatatcagtacatcaagatcattgtttatggctacatagtgtgccttaattgaattaaccagtccggtattgatgaacgtaagagttgtttttccagtcctctgctatggaaggacatgccatagtgaatatccttgtatataaaccattttacacagaagtacatctggaggataaattcctggaagtggagtttctggatcaagtgacacatgcatttatacttttgataagatattgccaaattgctttccccactggctgcggggctgtagcatgtcacacttcccatcaatgcccagggtgtctgctttcccacatcccccaaccccagggcacagtactatgactgaggcaagctgggaggagcctggagaggggcatcatcacaacacagtgacttggaggatccaggaccagtgccagactttgtccacagcgtgactggaaagctcttcatgtacattctaccctggctgggactgtaccccgaagggagggcctctccctttctttctgtagagtgggaggaacagttggtgccacagcgatgcctgagcccagatggggatgccactgtggtgggaggcagctgggaccgaggtggaaaaagtactttgtactttttctttccggccaggaggatcccaggaaattgaagaaaataaacatctccaatcctgcagtgcctaggcagagatgcttgcttaattaactgcatatttaactaatttaaaccatgttacaggaagagaaaatctgaagaacatagtctatccaattgtcatgtaataaaccaactccaatttccgtatggctttggtgaaactttgtttttgtactcattcctctaccattgggcgttttggttgtttccagtatttggcaggaatacctgaaaaatagatattttccctttaaaaaagtttattccagtgaattattagagcagttttattgctagcaagagtgggctggcttttagtgcaacgtggtgtgattttccatatacatccatcatatatgattttatatacacacatgtatgtgtacacacacacacacggaaacttctggccctgcatagataattctcacagctgaattatattgtgtgtccaggaacatggcatctcagtggccgggcagcccagctggccggaagccgagccctgggagtgacgctgtcccatcgtcatttcggccgcctcatgggactctctaggcactgggtttgttgaaactcgatggctctgtgtgcagagcttctgtcgtgtgcggagcttctgtcgtgtgcggaggagtttctgtcgtgtgcggaaggcgaggactgggagctcagatgaggcacttgcccggcctgctctgcaccttggttttctcttatggatattcacgaaatagcccagacccagcttgcaggttttaagactgtaccactgtgccacctgccccttgctcctggaccctcgcagcctctcccacagaaggactggggatgtgcagagagagccgactcaacaaggcagtggacagggaagcagcggcgggggcacccttcgcatgcagtccccagaggccaggaaggagcaaatattttcaagtgctgatccccagccagggctcccctggttgtatctgagcctgaagccggaagccccaggagctgcaggacccagtgcccaatgcgttgtcctggcctctttcctggcatgctgcgtgtggcttttctggaagggggcaagtcagccgtactacctgtcagccgggacactagggagacacagagaggagggatcagcatgtcacggatgcaggtctcacagtgaggtctgcagagggtggccacacaccctggtgtgaagactgtgctttcagaataattagtaatatgccccctcccctcagaagtgtcccattttgtatggtaggtcacagggctcccatattaatccggggaggcggacggcacaaagaggagaaccttgtcccaggtttcggggtggggactgctgggcagggtccctgcaaacacagcagctgggaggcccaggcccctccactctgggactgatcgtagcttcccacatggaggcccccatgaaaactccatagttctttcacctgagggtgacagctggcaagacagtctttgtaaaaaatgtattggtataggggcaaaatgctgccattcgggagagttttcaaatagaaatgtagagctcactgcagtctttcagtattgccttcttttctttgttccttttccgtttttttttttggagacacggtctcactctgtcgcccagactgtagtacagtggcatgatcacggctcactgcaacctctgcctcctgggttcgagcaattctcctgcctcagcctcccgagtagctggaattacaggcgtgcaccaacatgcccacctactttttatatttttagtagagacaggctttcaccatgttggccaggctggccttgaactcctgacctcaagtgttccatccgcttcggcctcccaaagtgctgcgattacaggcatgagccaccacacctgaccctttgcctgtttttaaaatggtatcccagcctgcggttctctggtgggaaggggccatggtgaccattttctgggagtctgcatgtttagtgtcgagatgcagcaaatgaagtcttattcaccaccatacttttgtttcacttgtttcaagaaagtgcttgtggccagaagtggtggctcatgcctgtaataccaatactttgggaggctgaggcgggaggattgcttgaactcaggagttcaagatcagcctgggcaacatagtgagaccccatctctacaaaatgctagaaaaattagctgagcgtggtggtgtgcaactgtagtcccagctactcaggaggttcaggcaggaggatcgcctggggccgcgaagtcaaggctgcaattagctatgactgagctgctggactccagcctgggtgacagagcaagaccccattgaaaaaaacaaacaaacaaaaaaagtccctgtgagagcaatgcaacagtccacaagttcgcggacttagctctatggcattgtgattgcagaggctcagatttgaattcagaagcatcctacatttctcctggagccagcaactgatcctgcattttatggggaaatctttatgctgtaattataggcccacatggaggggttctcgaaggtctcaaaatctaatcttgacaatgatgaaggccaggaagcgtttcccaagtgggtgagctgagaagcattgagacagagatgttgggaagtttctgagatcagacaagatgggaaaacagcatgcttgcgctctgaactcctgcagcccttgctgctctcaggccaaattgagactgattttccatctgctgccagcttttgccgctggggaaggggtcagggatggccaaggcatctgtgggcagcgctggtgggacgctggcctgcggttaagagactgactgcccagcctgggttcgatcccactttgctgttgattagctctgtggccctgggcaggatctgttctctaaagctcatgaactttcctccattgccatcctctcctggaccagcctcccacgctcaccctactatgagcacagaccaggcaggtgtggaggtgctgggagttcttagacctccagggaggagccgctggggcccagggtgtcaggggcttgagtctttccacagttcctccagtgacaggtgtggttgcctgttacagccttcacgctcatctttctctttgtcatttgtaaaacctctttgcatatgagcgggtgtattttcccctatcatttgttcttcaacctcttcctcctctatctctctacgttcccccctccctccgttcttgtttttggtgttttgttttttttttttcctttccctttccctttcacaatgtccttgcctgtttgtgatttaggaaaaacaaaacaaaacaaaactgagtcacattctgtcactccagccagctgacgtcctgggttcttgtcctttataagggtcagaagcagaggccttggactctgtggggtgactgcaaggtgggcggtaactggtaaccgcctctgttcagcagctgcaggagcttccaaaataggtgatttcatccccggccggagcgccgctggagctgtgtgggcctccccgtgacagcctcctgtcacaggcatctgccgagcctgacgaagcccagaagacccagggctcaagagctgccaggaaaacctcaggctttgtttgggcctcgtgccccacacccaggcgccagccgcagggacagatccgggcctgtcgggaaatccaggctccatctctggtgaactctggatgggacatgggcctggggttcagcaagggacatttgggtggggctgagactttgctctgaagcccctttggttcccagggaacggtttctgggcaggtccctcccctcctgcccagtctgggctggggtctggccttttccaagaaagccttctgtgttgtatctccttggccccctctggcccctcttgtgtagcactgcccagctgccccgggcacgggccctttccactgttgacgtgtctctccctgaacgtccaggatgctgaagatctgaagctggaggtggtgggctgggcaccactgtgaggcccaggcccactgccgtttgtcatcacaaaggtagtgattatttttgagttgtgcatccccagctagaccaaaacaactttgggcaaggagttagcatggattttgccaacatgttcgttacgtctagcacttggacaggggcgcgtatacagacgcatggcagatatttgagtttcaggcattgctgtgaaggggctgagacccatcaactctgcctccaggcatgagggtgagggtcttccaacacaggctggggctcaacaccagctctccccagcaggtggaagtctgaggggagcatctgcaggagagcagaccaggctctgtggcgccgatggggcggcagcagtggcctgagctgtctccccagcggccagcagtgcccaggggagggagtggagagcggaaccgtgaccctggcctctgattcctctccctttcttcctcccgtgccttccctctccccgccctgactggcctccccttgttggggtgggtgggttccccaagatggatggagcaggtcagaggagaggagaggtcggtgtctttgcctctggctgcgtcagttctttgtagggaagtcaggggtgggatgtttcaacctcctggcctgcattcttctttcaggcactagggtgggagcagcttgtttaattgataggaatatccatactgcaccggctcgctgagaaatcagactatcagactttgtttcctctttaaaaaaaactttttttagcaaggtatgggaggaagtgaagagtgagatccccatccttggagttaggacaaaatttattttgtgcttttcattgctaaactaatcattaattaatacttcccatgagaagcaacttggagactgagtacaagtgaacgcggtcagccttgctgtcagttggttcctggcttgcagtctcaaacctgaccgctgagagcacagacaattctgagtatagccccagtggtttaagaaaggtcagattccccagtctcctagctcttttatctgtcctcccctcctccaataaccagcgccaaagtttgtcctggtctttcccactccctcctgacccctccaacttcagcctcctaacaataatccatcattgttatctcatttgatgtttgcaaagcactttacagccattgttgtaagtttttcctctcatttgcaaagtactttacaactattattacaagtctttcctccaaacgtgggtgatgccttccaagtggctggaggagttcccgggatgccagcactgggtgggaggggctgcatccgaggccacagctgtgccccctggcttcggaatcactcttgcccccagggaagttcctctcagtgcctttcgtaggaaggaatgagaagtggtgcttaccgaggttcataccagatgtcagtgctagtttgggacttagttagtgctgtgtttgtgatttaacattgtagggccaacgttttcctctatggttaccttgttttggtaataattgtttaaaaatatgtgtaacatttcatggagcaggttggatggcaggattttgtggttggaaatatggaaacttctgccgatttggaggtgtaggaggttgactattggatgtctttaggaagcatagcctttactttggctgttttggtaacccctgacccttctatcgcaatgggacttctatgctggtgggaattccacactttctgccctagacaattagggtctgccatgagtcccccactctgctgagggtgtgttctaaaaatgaactaatattattagtcattattgatattcaaatccaatttgtccaaatagatcattagcactctgagacctgggttccctcctagctcctgtgacatctatcagagtgattaaatagcagatgctcagtaaatatttgttggtggcaaatacatacttggcaacctccagtgactttacctggacagtaaaataattgcttgaatgcataacccaactttgaggtgagcctgcaggagctgctgaggcacacctgtgtgttgggctctcaaggcagccagaggtgagtcggcagctgagatcacgctccagggattcctgcgtcctttaataagattctggggtgggcacagttctggggtggacatggtggctcacgcccataatcccagaactttggaaggctgaggtgggaggatcgcttgagcttaggagttcaagaccagtctgtacaacacagtgagagcttgtctctaccaaaaaaaaaaaaaaaaaaaaaaaaattagcaaggcatggcagcatgcacctgtagtcccagatacttgggaggctgaggtgggaggattgcttgagcctaggaggttgaggctgcagtgagccgagatcgcagcactgtactccagcctgggggacagagtgagaccctgtctcacaaaaagtttttctttacatcagtgtagtgtgggaaaaagaaaaaaaagactccattcctgcatataaaacaataattgtgaggagaaaagagaatctcccctccgaacaagaggaacacattatgagatgtttttcacttaaatgaaccagaatgtaggagagaggccagtttgcttatttttaggagtgtgactctatctgttagaggaacatactgagatatttatgaataaaataatagaagtctgggattttcttcagtaacacaatgtgggggaaagtgaatggaggtacaggtaagacaagattgaccacaaatgattggaagctggatgatagttaagagttcgttttcatattctgtccccttctgaatatgtttaaattttttcataataaagaaaaatagggctgggtgcagtggcttatgcctgtaatcccagcattttgggaggccgaggcaggaggatcacttgaacccaggaatttgagaccagcctgggcaacacagtgaaaccttgtctctacaaaaattagctggggatggtagcgtgtgcctgtggtcccaggttctaaggaagctagaggttgcaatgcccactgcactgcagcctgggtgacagagtgagactctgtctcaaaaaaaaaaggaaaaaaaaagatagaaaaagtaaaatagactgaggcaggagtatctcttgaggccaggagttggtggctgcagtgagctgtgattgcaccactacactccggcttgggtgagagtgaacccggtctctaaagagcaaaataaaataaaaaaggaaaccagaatgggagggttgcactaggtttggaatggaaaggtgatcttacaaggcctctatgtccaagtgcgattcaggctagaccgcgtgtcttggttcaattttgagatggtagcgccacccagtgtttattgcgaacacccaacaaaacgacgacgttgcccgcgcccgcctcttgctgtggagtgggcttggtctaatgtccttctgtaaattcctggcctctttaatcccctcatgggcaggcctggatgaaagaagcggggctgacagcccataggcacggactgtagaggtggcaacagtagtgttgattgtggtggtccagctgggagcaagctatgggcgggagtggccgcatctcatgggcggctctgagggcaggcgaccttggtggaggctgtcagtgtgacccaggtgtaaaaatagcctctgctgtgacgcctgtgctccgctccctggcctgagcaaatagccccttacacctgcacactgtttacttggtgtggacacacagctacctgtttgcaggtgcaaatgactgtttgtgtacccagagttgtggggagggccccccaccatcctcttctctggcccacattcccctagagcaagtagctgggccacataactagcaaaatgcgcaacctcaacccactcccgagctgggtcctgttggaaagagagctctttaccacctgtcctcccaactcaataaaagcacccctcttcactagagaaaaatctgcccttgcctctggcagcagcataggaagaatctggagaccaaggtagatgtgttttgggacagcaaattaggataacatgaagtcagagagacttctggagatggtgagccaggctttatagagactacggggagcaagaaaactggcccagcctgtctcacgagggtgaggagaatggacacaggtggaatctgtcaattgtaacattctgtagacatggatgataaaggtgatggcggggaggggtgagcgagtgaagggagcggcagaccccggcagccttgtggtagctggggagatgctacgcttatgtgagcagctctaaagtgccattgcttataatatgcacctttattttatataccaataagcaagaaaaatgtccaactatgatatggcagcccatacaggtatattaaaacagaaaaaatgaatgaatgaagctttttttgcaggacagttagcaaattccaagaactgaaaaagaaatttagtgcctttgactcagaaattctacttctcagagagtatcttaaggaataactagaaatgcacagacttaagtaaggagcagtgtttatgaaacaagaatccaaaactggatgaagattaatagctgaatgatactagttaaatgatggcacctttatatgatggaacaatggtatatgagtgtataaagaattttataaaatgagtttataaagaatttgtcattgggaaaatgttttggtattaagcaaacgacccacacagactcagaattatatagcttggcaaaaatatggatcaacatatgaaagtctcacaaggccgggtgtggtgtactcacccagtactttgggaggctgaggcgggtggaccatttgaggtcaggagtttgagaccagcctgatgaaaccccgtctctactaaaagcacaaaattagccgtgtgtggtggcgcatgcctgtaatcctagctacttcggaggctgaggcaggagaatcgcgtgaacgtgggaggcagaggttgcagtgagctgagatcgcaccattgcactctagcctgggcaacaagagtgaaactccgtctcaaaaagagaaaagaagtctcacaaagggctgggcacagtggctcatgcatgtagtctcagcactttgggaggctgaggctggagtatcgcttgagcccaggggttcaaggctggactgagttatgactgcaccactgtactccagcctgggtgacagagtgaccctgtctctaataaaaagaataaaataaatacagtcttacaaaggatacaatagaaccaaatgctcaaaacattagtgacaatctggattttctttatatattttggcactaattttcctaaggtaaatatttattatatctttatgcaaaaggaaaagtaatcttactaactttgaaagggaaaaagagagagcaaggtttgcgtggacctcagtgtgaggtgagaggcctagggctggaggctctgaatgtgatacctgcactgaaatccaggtgtcccgcctcccagcccaggacgtgggtgatcactgcaactttttcctcttctcgtgctcaggggaactctcagtgtctgggattagggagcaggggctgaagtcagagtgaggaagagcaagagcagcccgaggtggtcttctctttccaaggaaagggcattgtttctgtgcgctctagattctcagatgtgagagctgggcataaacaaagaattaatcctctgtgtcttttcttgtctgttccccccaactcagtagatatgtttgacgacttctcagaaggcagagagtgtgtcaactgtggggctatgtccaccccgctctggaggcgagatgggacgggtcactatctgtgcaacgcctgcggcctctaccacaagatgaacggcatcaaccggccgctcatcaagcctcagcgccggctggtaagcacgtgcctcgcagcctcctctgggcacctggctgcggagctctcgccttggtgggacatcctctggttttgaattttggaacttgagggtgtgcatcggggattacgtgggtgagagccccataataattctcacaactttagagttagctggagccaccagaatgatccaggctgtctagttcaacctcttcggcacacagaaactgaaagtgaggctcagaaaagctagtggccttgcccacagccactcaggtactgagtctcccatctagaactctggaaccagaatccaggtttcctggttcccagtccagtgttgactggagtgtctcctccacccacaccaaccctgcaaggaaggtcacctcagaggctggtctctaccctgacctcagttgatcagttgataaatcccaaagcccagaagtgcaagcagcttgtgttgggccccgtggctagggaagagtttgggcctggggcttggctcctggcttcctgctcctttttaatataatttgattctggtcaacaccaaccagcttgcactatattaaggagggaagaacagaggggataaacctggtgcctccctttcttgaggtcccagggccattcagactttgataccatttggacaccgtgattcctcactctctgcctgcccccggcacctgcagccccggtcagttctcctctcaggagaagctttcctgccggcagtgcccggcgctcactggttattcgcctgacggtgaatgatggttaggactggaaaccaggtctcgatgcccacgttcgctctcctcgggcagcagaaaccttgttctgatttattcctcgcagtggcgcaggtgacaggagagttaggtgccgtcacaggtcagagatctcatgcagggtcgttagggcccagccctgcctcccgttagggaggcccagctccgcagccacacgcgaggtggaagggcagtgcacaccttttacttggacatgaagcatttgtttcctgtcttgcagtccgcctcccgccgagtgggcctctcctgtgccaactgccagaccaccaccaccacgctgtggcgccgcaatgcggagggcgagcctgtgtgcaatgcctgcggcctctacatgaagctccacggggtacgtgggtcctgcgcccatgcggcatccttgccttctgatgcccatctctcagtcctcccttgtcttcttcctttgtactagcattcatttttccttcttaacaaagagacttagatttggaaggggctttcaactactttgctggcctcttccgtcctttacattgtataagtgaattttccgttttacagatgagcaggctacatttatatgtagcagtttgatgtgtaacaaaggtgacgtttcgattcagtggataagaagcttaaggatagttgtattgacaaaattggctgttcatttggaaaacagaaggaaagcatgacctctacctcctaccttaaacaaaaataaacttgggtgaattaaggatattacatgtaaaacatctttgaaataaactaaaagtaaggccaggcatcatgactcatgcctgtaattgcagcactttgggaggctgaggcagaaggattgcatgagctcaggatttcaaaaccaacctggacaacatggtgaaactttgtctctactaaaaaaaaaaaaaaaaaaaaaaaaaatctagctgggcatggtggtgcatgcctctagtcccagctactcaggagtctgaggtaggaggatggcttgagctcaggagtttgaggctgcagtgagctctgattgtcccactgcactccagcctgagtgacaaagtgagaccctgtctccaaaaaaataaaaatattagataataaaatactgcaaagaaaatcagacaataaaaacactggaagaaaatgtaagggaaagtatttatataactttggggatgggagaacttcttaaacaagattttaaaactttttagccatataagaatagttagatatatttgattttgtaaatatttactgtttgtgcctggaaatgatacctagggaaagtaaagaccaatacacacagtatcagaaaaagggttaatatttccagaattacaaggagcttctacaaagctctttaatttttattggaacattctccattatacaatattaacaaaaaggcaaggtgcccaacactacctactatggcactatttttataaatatgaggaagaatataatttataggtggttgcttccacatatacagaacacctctggtaggatatgtagagattggtcacatggtcacatgtatgcatatatacgtacatggggtgcctccaggagaaaaactggggtcctggggagaagggattggaaggacactctttttgctgtgtacccccttggtaccttagacgggacatatgcaagtcttaattgttcaaatacaagttaaattaaaaccaaaccaaaccagaaacagataggtcttgtagcctaataagaaaagaacaattgatctttccccacttcccccaaatgggcaaaagatatggactgacatctcacagaagctgcccagatagccatgaaacatgtgcacatatgctgaatctcactaaaaatcagagaaatgtacctgaaaatgaccatgaaagtccctagtttgcccatatacttggcaaaaattaaagtgtttgctgctatggatttggggaattagatactctcatatattattgatctgtatttgaattactgcatctattaacttagtggtattttttaaggttgaaaccatgaacaccattatatctggcaggtctactgttgggaaactagcctataaaaaataaccagtacatgatgacctttgaaccatttattgctgcattgtttgtggtggcaaaaactagaaacaaccttaaaaccccataaaggaatggttgaaaaaattctgctatatcccaaaatgtggaatattgagaagaaacttaaaaataataatctagggccatgtatcttgatctagaaaatgaaaaagcacattgcaaagaaatatatgtagcatgaccccatactatgagtgtcgaaggtgcattaaacagacatacatatggatgggtggacagaccagtggatgggtgaacacacacacacaaatatacacgtataggtgtattagtctgttttcacactgctgataaagacatacccaaaattaaaaagtggcttaatggactcacagttccacatcgctggggaggcctcacaatcatggcggaaggtgaaaggcacgtcttacatggcagcaggcaagagagaatgagagccaagcaaaaggggtttccccttataaaaccatcagctctcatgagacttactcactatagtgagaacagtatgggagaaaccgcccctgtgactcagttatctcccatcaggtcggtcccacaacatgtgggaattatgggagctacaattcaagatgagattttggtggggacacagccaaaccaagtcaatagatatatatgtgtacagatgtttgagaatttttttaaatgtaagaatatataacaggctgttaaatccatttgcctcactgggataggattgacggtagtagagtgagagggctgttgttaacttagtctcatgtatcttttcatgatttcttgttataatgaacaagcaaatggctaaagttatgaacattcataagaaaatatttctacaaagcatgtatacaaggatgtttgttaatcactgtaatagcaaaaatggaggaaagaaaacctttggaaggaaaatggttaaactattgttcttcaatatgggaatggtacaagaaacttattgggaaatattatataggtattaaaaagattatattctcagaaaataaaaaaatagaattaccacatgatccagcgtaccatttctggatatatacccaaaataattaaaggcagggcctcaaagagctatttgtacactgctgtttatagcagcatgattcacaattgcagaaagatgtaaacaacccaagtgtccacggagaaatgaacggataaacacagtgtgatatacatacacgtaggatattactcagcctttaaaaggaagggaattctggcccctgacaccacatgtcaaatccatagagacagaaagtagaatggaggctgtcgggggctagggaaagggggaatgaggagtgatgtttaatgggtatggagtttgagttttgcaagacgagaagagttctggggatggtggtcaggcttgcagaacggtgtgaatgcgcttaacactacagagcaatatacttcagaatggttcagatggtaaattttaagttaggtgtgtttcattttactgcaactgaaaaaaaaaaagcatacctaagtgaatggagattaacgtgagggggagattcttctgaggccagaatgggtttgaacatttgaggcatagctagggggatggggtgggggaggacacccttccacaaggtgggaaataggggtctgggtgtagagtcacagagagatgtgcagatggtggggtcggggggtgcaagtgccaccccatctacccacagttaaataggaggccagttcaagttcacatatgctggtgcatttctcgcttaaccattgcgtgttcatgtctctgaagcagtaattgcttttctttctgtatttgcaggtgtggcctttatcaatcccacatggtagacaagcacagcatagaaaaggggctaaaagatttggctcagcctaagagaaaccagatgtggggaaggcaccctgcagtcctgctccccaggactggcttaggcatctgtgaatggctctggggcctgcctcccaacagaactgtggtcaaagtgttgtccagggacattttatctcagaacctggtcacagggcagtctctagcatagtctcttactgctccccaccattcacagaagcaccaatggctccagccagacccaatgcagtacagagctgcaataagtagagtgatgttacatctcaactcactgggactgttgctgttgaggccaattttcccagcacaataattgatagcaccgctgcaccctcacaccttttgaagatagggccttgctccaccacccaggctggagtgcagtggcacgatcacggcttgctggagcctcgacttcctgggttcaagggatcctcctatctcagccttctgagtagctgggactacaggcatgcagcaccgtgcccagctaattttaaaacttttttgtagagatggggtctcactatgttgccaaggatggtctcgaactcctgggctcaagcagtcctcccacctcggccacccaaagtgctgggattacaggcatgagccactgtgcctggcctagcacccactttttgttttcagggtccttgtgtggatgataaaggcttttgaacagtctgtctctgctgcctgaaatgcctgcctctgtctactcaaaaccttttacaaactcaggtgtcacctccacactgaagccttccttgatatcctcacgtgcccctccttcccactcctcaccccaggacagagtttagtgtttctctgtctttttacatcaccgaccagagtctggttatttctccttgtctgtgaatttctgagggtaggagctgtgtgtctttagttccctattctccaggctctagtaaagtagccatcacatcacacaggtgctcgataagttttttaaaaatggaattgatttctttctcgctgagttccaggggcctgtgcagcccgtctgggccccaggctttgtggagagattgcttaggtgttgccttctcgcagcaggtgtgtgtctttcaatgctgtagcagactacgcagaaatggaaaaccctatatatttacttgtgaccctccaggtccccaggcctcttgcaatgcggaaagaggggatccaaaccagaaaacggaagcccaagaacctgaataaatctaagacaccagcaggtgaggaaaagatctgtgagtgattatatgagtacatcaggagccctcagagtgcctaagaatcatatcttccgggttaggcaggccagcccgggccgccagggggtggtgacagcatcggacatccctggcctttcaggacaggatgaagagcccagcaaaaaagtaacaattgccatggaacgtgttgggagctttcgaagcaggctcaactcaagctggggcctgatcattgccgactgcaaagacccagtgctcaggctggaccagccgaggtcctgcaggaaagaggaactttactcggtcctttcatctttggcgctgcagccacccaaaagctcagttcctttcaattctctttgggctaacggggatccaggagggcagggtccaattaatcatgtccctaacagattgatctctaagccaatgtataattaacatcatgcagtgctttgtgctttagaaagccccttcagaaatattatctccatgaaagtaagactccatgagaaccagtttatgaccccattttactaacaagcaaactgaggctcatagaggacaatgatttaacgagggtcatacagctgttaatgggtagagaattaaaacccaagtttttctgcttctgggtcaatgttctcttcaatataccactctgccttcttaatttctagattaagaataagggctgctcaaaagtttgaggctgcagtgacctatgatcgtgccactgcacttcagcctggagagcagagcaagaccctgtctttaaaaaaaaaaaaaagaaatacatttaaaaagaacgagggctgttcttttttaaatttatttttaataaatatattaactatttattaaatttaaattagatttatttataaaattatatataaatttctgacagaacaacggctgttctttaatacgtttatgttccctaccaaaacattcctcactcagtactgctacccagttaaagatttgactggtcggtgctgcagtcacagagaaaatgaattggctgatctgacgaaaaatttatcttctaacctaaggcatgacagagtcagataaatgggccctttccactaccaagaacatgatcaaagttctgcttttgtacattcaaccatggcttatcccttctggcaggcatatttcctactggaattttcagtgtctcacacctgtggtcttccacctctcctcctgcttccctactgctgacgagtcccctatgtcccctgggtaaccttatttcctctcacgtagcaatcacagatagagaagacatacggttcaggcgcacgattcccagtccaaaattccaaatccaggaagcaagattcggcagcaaaacctattttgaacagacactaggctgttgatagtctctgtttactccattcagtatgatattcacgtgttttgctgtggggatattattgtatttcattatagagtattatctcaggccctgctggaggtattctgtaataatacacagtatttggatttttaaaaatgtgaatcttcaagttgaatgaggaagaatctttttttaaaaagttttgaagcctgaaacacacgtggcctcaagggtttgagatgagatagggggaagaagccatccctgtgagaactgtagccctccgcagataaggacctctgctgctgtccccggcaaatgtagataaagccattagcttgcacccatcccggctgtctcgcaggctgccggctgttcgtttgtccctgccgctgatttgggtgtgctgactctgcttcattccagctccttcaggcagtgagagccttcctcccgccagcggtgcttccagcaactccagcaacgccaccaccagcagcagcgaggagatgcgtcccatcaagacggagcctggcctgtcatctcactacgggcacagcagctccgtgtcccaggtacgcgccatggctggggcgccagggctgtttgtggggaggccgactgcagagtcccagaggccagcctagtactgggtgggacttgcagccaggcctcacaggtgcaagcagtgagctaccctctgcgctaggaagacccagccattgagctgtgtggtgccctcagggccgcacgaggctaggggcatctgcatcgggctgtatttcaggacatcttatcaagatggtgatgtggacatgactgtgactcacaattttttaacagctcctctatgccatcatctttggaaacaaagagaggggagtccagggctggcatacagcatgggtggcaggggcggaaaacaacacagaagtacaacctgaatgagactgcgtgctggggcgaggggaggcgtggttgcgctgtcggaggccgagcggaggttctctaggcaagtctgcctcctacgtgcagggaggttagacttcaacagggagggtggggaaggaggaggaagctggcatggggaaaggcctggatcctgcagagggcaggcagggcaggctggtggggaggtcacaggcaggatgccactttcatgagacccagctctgcacgtgtgtcaggggacgccctggggcagcccatgttccctctggcggaggacgatggcgtctcggcctccctgcctcctcccctctgcagttccctctcttgggaccaggatgcaccaagcttgatcacggtctcctttgaccagccctggctgttatctcgtctctgctcttaactgaaggaggccgtgtcttagtgagcttcttattgtctgggagaacctgatcccacagaaccaggggcaccaggagccccttctgggccgggtggatggcttctttgttggaaagtggatgtggtggtgataggatggtagaaagtgtctcctgtaaccatcagagccttctgggcaaccacagtatccacagggccaccgggtcatagccctggttgtatactgtgctcagaagcagctgatgcatcacccagacccttcatgcctagatcaccgggatcaggagaaacagagagaagtgctccttggtcccttcctgagggctgaagccatcctggggacatctgcatagcagggcaccctccccagcctagacctcccaagccctcaggagcgtctccatgggcctcatcgtgtgctttctgcttttcagacgttctcagtcagtgcgatgtctggccatgggccctccatccaccctgtcctctcggccctgaagctctccccacaaggctatgcgtctcccgtcagccagtctccacagaccagctccaagcaggactcttggaacagcctggtcttggccgacagtcacggggacataatcactgcgtaatcttccctcttccctcctcaaattcctgcacggacctgggacttggaggatagcaaagaaggaggccctgggctcccaggggccggcctcctctgcctggtaatgactccagaacaacaactgggaagaaacttgaagtcgacaatctggttaggggaagcgggtgttggattttctcagatgcctttacacgctgatgggactggagggagcccacccttcagcacgagcacactgcatctctcctgtgagttggagacttctttcccaagatgtccttgtcccctgcgttccccactgtggcctagaccgtgggttttgcattgtgtttctagcaccgaggatctgagaacaagcggagggccgggccctgggacccctgctccagcccgaatgacggcatctgtttgccatgtacctggatgcgacgggcccctggggacaggcccttgccccatccatccgcttgaggcatggcaccgccctgcatccctaataccaaatctgactccaaaattgtggggtgtgacatacaagtgactgaacacttcctggggagctacaggggcacttaacccaccacagcacagcctcatcaaaatgcagctggcaacttctcccccaggtgccttccccctgctgccggcctttgctccttcacttccaacatctctcaaaataaaaatccctcttcccgctctgagcgattcagctctgcccgcagcttgtacatgtctctcccctggcaaaacaagagctgggtagtttagccaaacggcaccccctcgagttcactgcagacccttcgttcaccgtgtcacacatagaggggttctgagtaagaacaaaacgttctgctgctcaagccagtctggcaagcactcagcccagcctcgaggtccttctggggagagtgtaagtggacagagtcctggtcagggggcaggagtgtcccaagggctggcccacctgctgtctgtctgctcctcctagcccttggtcagatggcagccagagtccctcaggacctgcagcctcgccccggcagaagtcttttgtccaggaggcaaaaagccagagattctgcaacacgaattcgaagcaaacaaacacaacacaacagaattcctggaaagaagacgactgctaagacacggcaggggggcctggagggagcctccgactctgagctgctccgggatctgccgcgttctcctctgcacattgctgtttctgcccctgatgctggagctcaaggagactccttcctctttctcagcagagctgtagctgactgtggcattactacgcctccccacacgcccagacccctcactccaaaatcctactggctgtagcagagaatacctttgaaccaagattctgttttaatcatcatttacattgttttcttccaaaggccccctcgtataccctccctaacccacaaacctgttaacattgtcttaaggtgaaatggctggaaaatcagtatttaactaataaatttatctgtattcctctttccctcgtcccttagtggtcttcactgggaggttcagcgttgctgttctctcccggggaatcttgaggccgtgtaggcactgacccactcacagctgcttactttatttttggccattggccaatgctccctctttaggtagcagtgggtcccgaaaagcacactcatcccagccctgctaacatgagacattagatgggggtcaccgctgggctttaatttcctgggagagggttgtacctatccataaacagagttccttgtggtccaacaaaagttgctcaatgtatttattgatttattgagacagggtcttgctctgttgctcaggctggagtgctgtgtgccatcatggacctacctggctcaagcgatccacctgcctgtgtcttgagtagctgggaccacaggtgcacaccaccatgcccagctaattttttattttgtagagatggaatcttgctttgttgctgaggctggtgttaaactcctgggctcaagcaattctcccaccttggcctcccaaagtgctgggattataggcatggatcaccgctcccaaccatctgagggcatttttagagctctcctccagacctcagggtctggagcaagagactccatctacctggaagaaaatgttctgtctagccctgtctgacttaaaagtgtgtccctccagggcaaggagctcttgccattttatggtttgatccaaacaggctaaggggcaaattatgtcccacaagaatgagagagaaggctggcagttcctctcctttatccatttgtcttcacctccttaggccacaggggtgcttaaccacttcatcttaaaagtatgtggagtggggctgggcacggtggctcacccctgtaatcccagcattttgggaggccaaggcaggaggattgcttgagcctgggaggtgaggacaagcctgggcaacagagggggactctctacaaaaaagtagaaaattagctgggtatggtggcgtgcccctgtgatcccagctccttagaaggttgtgggaggatcgcttgagcccaggaggtcaagactgcagtgagctgagctcatgccacttacacttcagcttgggtaacagagcgagactctgtctcaaacaatgaaacaaacaacaaacaaaaccttttgaagcccgcatcaagtcctttaacaattaaggagagcatttatctttaaaattagacttatatgcctctaagataggtgagcagtaacaaaattaattttagctgggattatgctgtgattatgtttggcttaacagtaatgaaaataagtttaggctgggtgcggtggctcatgcctgtaatcccagcactttaggaggctgaggcaagcggatcacctgaggtcaggggttcgagacaagcctgaccaagatggagaaaccccgtctctaccaaaaatacaaaattagccgggtgtggtggcgtctgcctgtaatcccagctactggggaagcggag

SEQ ID NO: 221 - DNA, 36087 bp, Homo sapiens
  source 1..36087: mol_type = genomic DNA
aaaacgaagaattctcgccaacttcctgaattccttgccccctcccccgcactgccaggccctgtcccgctcccccaggagccacaagttcacaactcacagttacgtgcagaggaaacaacgcttagctacgaggtctcaccatctctggaaaccatactttacaaggcacctctccaccccagttcaactctgcacaggctcctcttccttccctaactgggaaaacacgaaaatagaaacaaaacaaaaaaccagagcctaaacgctttctaggagaccgaccttcagaaaatcatttacttggatttacctgggcggggggtagggggtggggtcggggtaaagtataaaaattcattctcacaaaaacaacgcctcttgtcctaaagtctccctcggcagccttctggggtcacgtctgtcggaagaaatcctttctgtaagcgaaagggagcgagacatatatcacggctcctgcagcggacgagcctgcggccgcgcgagttgccgctgacagatcggcgctgataaccccgcgacgttcatttccagtcccttttgcccgctagggaccgtatcagtttgtacagagttgtgataactgtttggagggagcgaagagggggtgtgtatatgaacgtgggggtggggaagcagcatttagcgctgggtccagggaaggtgacaccccctcttcgcagtgacttatctgtgacttacctgaaactctccagggaaatatcagaaactctccagggacatcaaaagttggagagcgtcctcggacacgactgatgtggaagcccttttccattctgcgtaccccatagactacctttccgtacatgacgacccgagttaaagttcccaaaggtcagctggggaatgttgtcttgaggttcccgaaaccaccacgacctgagccgtagcatcccgagatagggtcggagaaagtttaaggtcggtctcacacaacttcagggcaaaaagcgcatttgctgtgaaggggctaggcgggggttggggggcgggggggcgcagagcacgttcccccttccttctgggggcgtgctgacccaaggtctggagcgcccctcccgccgcggcggcggcgcgggactgtgcactgccaactcctcccgtgccaaggctccctccccctccctcgtgtgggtgtgtgtgtgcgactgcgggagcgggagggtgcaccgccgctggatgggtgcgggtcgctagccaggtcaggcgttctgtggcctccgcccctcccccggggtccctgggctcggtgccccccgggtggactcgcccccactccggggacagggcttgcggctcagcccacgcccgcaggcagcgcggctctcattgtctgcctgggcggcgcgctcccctcccccctcgccgtcccctccccaccctcttttctctcctcccctcgatccctcctcctcctcttcacctccagcgcccagctgctcgctgagcgcagttccgacccacagcctggcacccttcggcgagcgctgtttgtttagggctcggtgagtccaatcaggagcccaggctgcagttttccggcagagcagtaagaggcgcctcctctctcctttttattcaccagcagcgcggcgcagaccccggactcgcgctcgcccgctggcgccctcggcttctctccgcgcctgggagcaccctccgccgcggccgttctccatgcgcagcgcccgcccgaggttcggctgcttcctcctcgcgcgatctccccgctttcctcccctccacccctactcgtcgcgggcccctggcctccggctctccggccctctccaggccgcggtcggctccgacggtgtttccctccttccctccgggcgggctgaggcggctcccaggctcccgggacaccgcggaccaacttctagtctctttttctctcctcgaagcgcttatctgcgcgcagccttatctccgagttatctcggcgcaaaggggcgggagccggtagttaggcaggcagagaaacttctttcttgctatctagccaggtctgtgtgtgggcattaattttagtgtggtaatctccgatgagccgaggcgatttggaagagcagcctggaggaggccagcccggctgcatttcacctccctcccccactcgctccgagtctccctgtcattcttcctgctctcccatttggggtcgcctcggctctggggcggtctcacgctcccccctccccagcccgttgcgttccccctccttttctctgctctccgctccaccccgctacgtccgattccggaacggtccggcgtttctgctgctggagatgaccgcggggtgggccgggtggcccggccggcgtgagcgcgcacgctggtggctgcaggcgcgggccgtgtctaaggtgtgcggcgccgcggggacgccggtggggctggcgattcccgccccacaagctctccgcattgcctctgctgggaaggacccagactgctgcccccgccctggcgtcccactttccctgggccgagttgcatttctctctggggctcgcgttcgggctggtcagcgcagtccgggaagctctgggagagccaatataggagaacgcggcggtttcgttttcggggacaggttgccttccttacgcgaagggttttcccgtggggaaccctcaccccgaggcatttcgggagaggggcatccgcagagaggcgggatgcggcggtgccgacacgcacagctacttaaattcttttgtgtgtcatcagcccgggggagacactttagggcggaaggaaagcctcagccagcttctgcagatcacccctgggatctggcgcgcgcacggagaaaggatgcggccgagggggtgggcggggaggacgcggggaccggagcggtgcctttgagggagggctggtatcccagcccttccagggccctgtggcggctgcgcaggctcccttcccctcccttattgatctccacgcccggggcagaaataggatctttgagaagtctcaaatgggatctttgagaagtcagatcccatttgaactagaaaaaggagtggaggcgaggtagcgtgcagcctacgctcttgttaacccgtcgatctcctaccatacccgtctcccccaccccacctcaggagctagacgtcagcttggagcggcgccggaccgtggatggccttgactgacggcggctggtgcttgccgaagcgcttcggggccgcgggtgcggacgccagcgactccagagcctttccagcgcgggagccctccacgccgccttcccccatctcttcctcgtcctcctcctgctcccggggcggagagcggggccccggcggcgccagcaactgcgggacgcctcagctcgacacggaggcggcggccggacccccggcccgctcgctgctgctcagttcctacgcttcgcatcccttcggggctccccacggaccttcggcgcctggggtcgcgggccccgggggcaacctgtcgagctgggaggacttgctgctgttcactgacctcgaccaagccgcgaccgccagcaagctgctgtggtccagccgcggcgccaagctgagccccttcgcacccgagcagccggaggagatgtaccagaccctcgccgctctctccagccagggtccggccgcctacgacggcgcgcccggcggcttcgtgcactctgcggccgcggcggcagcagccgcggcggcggccagctccccggtctacgtgcccaccacccgcgtgggttccatgctgcccggcctaccgtaccacctgcaggggtcgggcagtgggccagccaaccacgcgggcggcgcgggcgcgcaccccggctggcctcaggcctcggccgacagccctccatacggcagcggaggcggcgcggctggcggcggggccgcggggcctggcggcgctggctcagccgcggcgcacgtctcggcgcgcttcccctactctcccagcccgcccatggccaacggcgccgcgcgggagccgggaggctacgcggcggcgggcagtgggggcgcgggaggcgtgagcggcggcggcagtagcctggcggccatgggcggccgcgagccccagtacagctcgctgtcggccgcgcggccgctgaacgggacgtaccaccaccaccaccaccaccaccaccaccatccgagcccctactcgccctacgtgggggcgccactgacgcctgcctggcccgccggacccttcgagaccccggtgctgcacagcctgcagagccgcgccggagccccgctcccggtgccccggggtcccagtgcaggtaagggtcgcgcctcaggttcggggtgcgggtccaaagcgctggggcgcacgggggacgtggagcagctgctccactcgggccctgttttcaggactttctcgtccgggtgcgcggaggtcggcctggtcccaggaaggatttgcaggcctgtggctgggtaacccagagtccggtagcgctgaggcgagttgtgccaagacttgagtctgttgtgccaagttcctttccacggatgagactaaatgcacatctgtaccttcgtgccttggggaagctcagggccttgatgagtagtgaatggcatctgctattggggaaaaacgaggctgggagggaactaacagcgcttgagccccatcgcagaccctactttgggtgagtggaagaaattccacgatgggagtaagtttgggagagtggcgggcacttgatccacccccaaacagacacacaagcacatgcaggctcacccagtttaactctccaaagggtgcgtgtttgtgttttcctagagaagggtatttagaagagcacaacagaagaacctagatgttcctagggaagctagttggcgtctcctctcccacaagggagagagggaaagaagagagggcacctggagtggtcagacttgtgacttcatggtgaaggagagctggtggataggcccttgggcttggcatcagctgggccttggtctggggctgctgctcacatggccaggctgcaactcagggatcctggagctggggcacctattctcccttcgaagtttagcccgccaatttttcagtttccaatttgactcattttttcctgtatctgggagccattagggggtaaaccgtgaaaacgctattgtcaaaaatacctggaaatacctcgttttgaaaagtgttttgtttactccagcacaggagtgtgggagccctgttaggctgtttttctcagatgcaacattctgcgtccttggtgctttcaactggcttatcttaccttatatttcacctgtttgataatctttctaaggaaacaacatctttttttattgtagtttgtttgaggggaggtgtgggggaggccccttgagtcacagaggtggcagagtggaggaaggcacattactccaaacagtcctaccccggtgtcttgtgtatcccaggtctgtgcttctcgtgggagcctcgacgctacctttaggacagcaagtcagtcctaggggccaggattccttaggataaaatgggacattcccaaccttgtccgcaaaagacacgctggaaatgcaagtggtctgaaagagagggaaccaatttgaacagctctctgatagcctgagttctttctgtcttcttccaagcgctgcaagacttggtctcaaaattccctctttttagttttgctctgtcgcccagtctggagtgcagtggctcactgtaatctctgtctcccgggttcaagcgattctcctgcctcagcctcccgtgtagctgggattacaggcgcgcgccgccacacctagctaatttttgtatttttagtagtttttgccacgttggtcaggctgtttttgaactcttgacttcaggcgatccattcgcctcagcctcccaaagtactgggattataggcgtgagccaccgcgcccagcgaaattccctctttttgcttctgctgcaaagctggccctggagaccatttttcccctgtgtgtggaatgggatcgggggaccctgttgagatttgcactgttggcttgggacttgagagtcagggctctcatccttacctctgcatagggacccgtgtttggctcccaggagcagagagatggagaggctgggaatctctaaggaggtaatggttgggtgtgaagcttattttgtcagtcggggagttccgtagggaatgtgcaagggtgttgtgagttgggtgaggggtagtatctgcagattgagccagcgcctgcagctctgcctatttcttgacacaccttagcctgatctccaggttcctttcctccaatcttccagcatttcatatggctgagagagtcttttgatgtttacagtaactggtcctgtatgagaaatccttttagaggcagtatggggcagttgtgggcaagttaatatgtttctttttgttttaaatttagcctacacttttcctaattttttcatcttctgggcacaccacagttagaggaattttctgtagacccagaagatttgttatttttttaagtatttttttaagtatgtttaaaaaaatgggaagggatttgggaacacccagcttttgcatagagtctgttaggaaatcaggaagtgactgggaccaagccagtattggggtgaagggtggggagcgagtgaccctaactttgcttgtcctcacaggtattctgaggccagcttcctagctagatttcctgtttcttagatttttttttttttttaaacaaaccgtttttggaggcagacactttaaacaccagagctaaaacctgagtgctgaacttgatcaacccgcacaatttggaggcttctggaaacccacactatgcacctctcgctgactgggtagatggggtgagcttactttggggtgagctcagagtcctcacactcctttatttcctgggtcctacaccctcctaagcgcctgcagaactgtgagtccctgtgtcttggtaccacacacagaaagacaggtggtggtgcccttctcccctgaatctatcactccccaagggcaccgcaaacagccatgttaggagagaaatggtgagttgaaaagggggaacttggtgagcaagcccccagcttttatatcttacagcttttataaagacagcatttttttttcctttttagtcacttacaggattatagctgcctggtgggtttgggaaagaggtagggagggaatgagagagattttattcaactaaaaataagcaagcttcctaggttgtatttatccaaagtggacttttaattaaattttgtctttgggttttcagatgactaaatagttctacctggggagttcacactgtcttctaataggattcttattgttcccagtcataggactgggttttccagggaatgccccactcctctatccagaggggctctgataggtaacattttaaagtcaacaacaaagacaaataccttgtttaacttcagtgtccttgaagacctgagcattttactgattaccgtagtcaatagtggcttttagggcggagaagaataaacctttgtgatgtgttgtaagttgcagtatccccatgacaactttgaactcgggttgtgtaggatgccagtttctttaaaacttaataagaaatgagaaaagagacttgttttgtaaatagtattaatggaattaaagtttttatgctaaagtcatatttaaatatcgttaccacacagttgatagtagacacaagcaataaactgcaaggggatgagaaagaaccaaaaggttcaccagcacataatcttaagctaaaactctgaagtgtaatgtttatttactttaaaaagtgattcaggaatgcttcttcaataatgcagaactaggacatttaaaccttctataatctaaagaaccttaaatggcggtctatacttttttttggtctatacttacaataagtacctttctcatttttagagacatttattcttccatatttaaccttcttgagaagtaataaatgttacatttactcttaattaggatttgtttttattagcaggtttaggttattgtgaattctgaaaactaaccaaagaataataataataaaattatgtaaaataaacacattttaaatcgattgctaactcaaaatgatcactgggaaggtcttggtaattttctcaatcagtaaggtatcaaccttttataaaaattttgcagatagaagcagttggacccacttctaaatcgggattttagcatttgatctttgtggcatgaaaataaaactctgtgcttaacgttagtgcatttttcccctgaaaagatgagagtaatcttctcatttctagtttctaactaacgtaggtgcctaagaatagtacttttaatttcacttgtgtatctttaattggagaagaggcacatatggacgggtggcagatgtagaaaatactttttaaaattacttgagataaaagttaatgaggcagcctcgctgtgtccccggatatttgtgggttgcagcggggctcagtggtcagtatttctgtgtggcttgctcgggtttggcaacgacgtactgtaatgatgatggatttcagtctttaaaagctccgggacagcctgagagtaggggtcaggggactcaagccgacctccccaccgctcatctcggactctgacgtcctctgcttccagcactgtctctttcccggagtctctactggggcgctccgggtgtgcagaagtattggacaaatggtcagtggagcaatagtgacgaaataaccctgctcctggctttgcggccaaggagaaaagctcagccgggaagggcacgggcagggaagccgggcaccggggctgggggccggggtccccggggtgacgcggggagggacgggtccggcgcgcccactcccgccctcacgcaccgctgtcgccgcagacctgctggaggacctgtccgagagccgcgagtgcgtgaactgcggctccatccagacgccgctgtggcggcgggacggcaccggccactacctgtgcaacgcctgcgggctctacagcaagatgaacggcctcagccggcccctcatcaagccgcagaagcgcgtggtgagtgtgacccgccctgcccctggctcgcggccggccccgggctctcctggcccggccggccccgccctggctcggcctgccttgggcgtccccctcccaggggacaggtgcggccgctgcggtcccaccctagcggggacccagcggtaccatcctgtcccggctgttccaacgcccacccgctggcgcccaagtagaagttaccccgaaactggcctctgggaagccaagatagcctttccccatgtttacgcgcaggggatgacgtccgtaaatgacaaaaacaaaaacaaacaaaaaaggaaggtgcaaaatgttaccatgttttaagcaaaaaaagaaaaaataatctatatatctctaggtgtacttgccaaagcaccgtaataattctggtaagataggcaagaaattggtgatggtaacccgaggagaaaaacagtagacctaccgaggccgggcgaaggaagacttttttcactgtgtatggtttagattttatgcttgaaaaaccatgctcacttataccattcgtcccccaaatagaatatgccagaaatccacccactcacgcctcctcacagccacattcttttgggtgccgtttactttgtcctttccaccttcttggtcacttctacctcttatcctcaggtgtatccccaaataccatatcttggattgcccttgagcctggtgaaaatttatttgctctaacttttgttatttcaaaatcagagaactttgtagaacttgagtaaaagtgtggtttgtatgttcttaagttgagcattttccccaattcgcacacgttttactgtttttttgttttttttttttttttttttttttttgagacggagtttcactcttgttgcccaggctggagtgcaatggcgcgatctcggctcaccgcagcctccgcctccagggttcaagcgattctcctgcctcagcctcccgagtagctgggattacaggcatgtgccaccacgcccggctcatttttttgtatttttagtagagacagggtttctccatgtaggtcaggctggtctcgaactcccgatctcatgtgatcccgcccgcctcggcctcccgaagtgctaggattacaggcgtgagccaccgcgcccggccaccatgttttaaagtaagggaatcctgatttcagggattaatctcgtattgtcattgttatgtgtgcttcctagccggagagagtatttaccgctgtaatagagaaaataaaggaaagctttcaccagtcccactctaaggttaacatttgtttagcgaagtactcataatctaataaccctttaaagctaaatatgttacagttagatgccagacgtcttaagtatcccagtaatttatttgttatactctaattagcaggaacaaatgctacacatgttgtttgtgttaaatagattagagtgaaattgcatcacaatgtaagtctgacaccttaaagagaagcaattagttttatggttggttttgttttaatgcatttaaaataaagtggccgaggttaatttaatgagtgtatgtgccttaaactcgttacaacctcccacagcttaaaattttctttaaagggtacccttaactgcagtgtgtgactgtgggtttcatgttttcttaaatgcatcatattaaagaagaaaaagtagtaactggaaaatatcccacagaagttccttgttttcatataatagacaacacatgaacaatgaaaccgatttatttttctggaaaggcacattgagctgagtactaactgaactttcaaaggtaacattttctagagattgagcaaaaatttggtggaatagtagtcatttaggttccagttgcattataaatttgatctagtaacatttagatagtgccatttgttttgtgcatgtaccagtaaaaataacttagaaggaaaaaaaagaacagtttttagcatttctgaatcgttagctttctttgtgcttagcaggtgtcttggccataaccaaggtcagcaaatatgctttgtaaatgggttataaatgataccaattgaagggtgtgtcactatcaattaggtctccttgtgggcttcttatttatggttttgatggatctggcttagttctcagaagcagaatgttgaactcaagtttgtttagccagcactatagaaccaatcactgtgaatttgaacttgcaatacattgcaaaataagagatttatggtgtaacttgaattccttgtcagtgaggaatatgactgagatcacttgttacaaggaacttttataacccattcacctgcatttcacatgtttatgaggactggcttcacttatgatctgcagttgacagtcataaagtcctttgttataatggcaaattctgataacaagtttgcttcacattggctccaaattccactggaaactgtcataaatggctggtttataaagtgaaccttcctgtcccttgtttactgatttcacatttatgaagagaaaggaatcctttcctaaaaaattattttcttttaaccacaaagaaagaaaaaagaaaagcctggatgtgtaaagttttgttaatatgttgtcatcattttagcaaagcagtttcccaggtagctctcctgtgagccaagcatactcatttcaactaaaggcaaattgattcttagcactgacttcctagaaatgttgtagtgctaaaaggtttgccagtgtctctgtttataacttctctgtagagtgatgctaagtaatgcaacaggatgtaaaccataaatgcagattttaatttcatcttttaaatttcccagcaaaggttttggaagtctctgtcctgtaatctgtgaatattcgatacatactcaatttacatttctctcttcttcattctttacaattgatcttaacttcccaaattttgtaattttcaacttggtttggtcctgaatctttctctgatttttttttttaactatggaaggcttcacgaatttgggtgtcattcttgcgctggggccatgctaatcttctctgtatccttccaattttagtatatgtgttgctgaagcaagcatccattttttttttaactgaagctatgtcacaatttttaaagtaatttacagcatttgaaaggaaatttaagcttggcaacttaaaaacgagttttatattttgccattctgggtaagaagttatgttagcttattataattaacatgtagtaatctagaggtaataaattccctttaaggctgttatgggcataaagaaaacatggaaatgggagtgacagtggcagacaggtggccttttacctttcctggtaataccaattaaccctttgcatgaacgaaagttgagaataatactgatagggcaaatactgatattagtatcactgcatctaagacagtggcagcattaagattatgccataaaatttgctcgtatcctttgtaaaatagataaaacaaaaatgcaggcagcaggcaatcatgatggtaattatggaatgtattcaaatatatttcttttttttttttaaaaaaaacttttacccctcttctgaaagccatttctaataatgtactttcaaagtttccattaacgtactttcaaagtttctggtttactcctttacatatatctgagaaatagacctggtgatctccggttttcaggggaagtggagactgcccagagccatttagcacattagcaagtggcttgtgattgcatttcacgacctaaatcttagacctgtgactatagtgcacggccaattgctgtccacggtggggggtgggcggcagggaggtggggcactttcatgttaatgtctacttgtgttgttacttctggtgtgttttgagtataactctatttggccaacttttagaaaatcttttaattcccctaaaaaagataccagtagtatctgggaaactctaaattggagaagaaaccagggatgaaactctccttgatatgatgctggtaaaagctttgcatgaagttattggccaactatatgactgctcccgggtattcttgaattcacggagacaggctagctggagaagtaaatcaaatctatagggtccagcatactatgcaaacctcaaatttcttggcccagaaaagtcagtataagtacactgcaattttttttctcaaggaccatttcatttataataaaacagatacatacttgttgatgacagggacaaaataccttaatgtatgtatgtaatatatatatatgtcacttatatttttccacttatgttcttgtactgtttctagccttcatcacggcggcttggattgtcctgtgccaactgtcacaccacaactaccaccttatggcgcagaaacgccgagggtgaacccgtgtgcaatgcttgtggactctacatgaaactccatggggtatgccatgtattctgctcacttgtatatacatttagtatctggtttgtatgtgatatcagttacaaagaatcagcaaatgaaagatactcaagtgaaaaatttgaatgcatataatttattactgaatatgtttaatatattcagtgtacatactgaatatatttattgaattgaaggtgcttttaattataatatgaaatattaccttatgcaccagtaggaaacaaaaaatgctaccagttgaactattgcaaacgttcatttaagacacattccagttttagaaatgtgaaaatgtgaaaagtgtgtattttagaattggtaatatggtagtaactgtttttaaaaatgcacaattaaggaaatcaataaaaaatgcacaatcactagtctatatctcttaaaaattttgaatgtaatcagacatttgtgcaaaagagtaatgcatttaatagttatagtttgaaatatttcatagttcattttaaaggattgcacaaaatataataaacaactcaatcttaaaaagaaaaataaccttgcatctgtaggaggaaggaaatacatgatctctttgaaataatacttcttcaatgaatagctactcatttcaaacaataaacgttaagttgaaggaattaaattctccttggcaaatcatctcattctttctgaaggaatctctgcatttgatgaggaaagtgtagtctttgtgcacttgggatcttgagtgtgtataaaaattggattgaaatttatgccaagttctttttttttttttttttcttgttttgagatggagtctaactcttgttgcccaggctggagtgcagtggtgctatctcggctcactgcaacctccacctcctgggttcaagcgattctcctgccttagcctcccaagtagctgggattacaggcatgcgccaacaagtctggctaatttttgtatatttagtagagacggggtttcgtcatgttggccaggctggtttcgaactcctgacctcaggtgatctgcctgcctcggcctctgaaagtgctgggattagaggcgtgagccactgcactcggccgccaaattcttttaaatgagagcttttagtgccaatgttgggtctttggtttttcttcaatataatattaaatttatggcctatgtgaaaattttttaggtgcccagaccacttgctatgaaaaaagagggaattcaaaccaggaaacgaaaacctaagaacataaataaatcaaagacttgctctggtaaatatactaaaatgacgtttgactgtaaagtatttgccaaccttaacagtagagcatatgtatatttataaggtttattttgactgttgcaggtaatagcaataattccattcccatgactccaacttccacctcttctaactcagatgattgcagcaaaaatacttcccccacaacacaacctacagcctcaggggtaagtattaaaacagcatagactcctaaattactgggctgctctctagtaaattatctcaaattttatcttatctggtagtacaataatctaaaccaacagttcagtttagttagttgatacctaagaatagtttttagaggaaattacatttaaatgtcaacaaaatgacaaacttaagtactttacaaacctcttaattaagatcggtatcatttttttatggttaaattaacccaagtaaaagcaagaagttttggtttaaagtgttttaaattgttttatttccaggtttttatcagagttgctatatatattatatgtgtatatttatgtatttccgatgtagatcataagaactatgaggccagtggtttcatagattacagtgcccataacagttaagtagcttttgtttatcctatcaattccagcctttttttctttttttatcatccacccaaagcaaagctcatcataaagtgttatatgctgctgtattcactatttcctttgcccaattgtgttcttgctgggagagcttgccttcttctaatgtaccttaattgtactggcgtttatttcagctatgacaaaacctaggagtgatttgtgccactgtggacaggagatgcctgggtcttcgtgaggatcacagacttagtttcttataaagctgtgaccaaaactcagtttgcctctagtagagagcattttcccaccctaatgtttcccaaatttacctggaatgcccttctaaaaaatactgggccttccctcagacgtcagtgagctccaaggcagggcctgcggcaagcaggactttaaaatgtgtccttgtgacccttgggactacactgagacaagattaggactaaacaccagcatttaaatgcctatttacttagtaattgttttctacatttagttttctcctgaaattatttggggtactttaaaatactacagattcctgggccccaccctggattttccaagtcagagtctctgggtgtgggacttggatatctatctgttgttgaacaagtgccccaggtgaaattggaactactgccccggaggtgtttgggaaccacagacctggtttctttccactgtatttttactggctttaacaaacaaaaattaaatatttaaaacaaaatgtttaaactgtgcttaaaattatatttgatatttttctttgtcctcctacccaaattcttttgagccttttctgtaaggaaacaaaacgtctttttagagtttcacaagggaagaagccttttagttgtttttttttttgcagactcatggtaaagaatgtttctaggctttataaaggtggactccatgctatggtgttgtgttttacaggcaggttagatgtaactgaggattgaaagtggtaaatagaacatgtttcttgggaaatgaaaagattatttaataataattattttttttttgaggctgagtcttgctgtcaccgaggctggagtgtgcagtggcgcaatctcggctcactgcaacctccacttcccggattcaagcaatcctcccacttcagcctcccgagaagctagaattacaggcatacaccaactcacctggctaatttttttttgtatagttagtagagacggggtttcaccatgttggccagggtggtctcgaactcctgtcctcaagtgatccacctacctcagcctcccaaagtgctaggattacaggcatgagtcaccgcgcctggcctaaaaatatcctttattatgccgtagtcctcaggagcaattatgtagctagaggcaaaacaatttggttttctaaagcagggagggagccgcctctctcctagctgaaatgaggactgctgccagctccaagtcacttttgttggtggtacagtccagcttaaatgtggcaaaaagactaatttgaatgataaattgcactgaggtcgatatatacccaacaatgggcttcggggacttggaaccattgtgggtggagtcttgtgattttgtgacgtaaaatttcaaaatttgctattagcaagtcctatcggttgctgtccagcgaaaggagtgaaaagccagtgaaaagggccatggtctggctagaagaagggccttgggagttccatctctggtcctaggcttattgtcccaggaactctcaccagggacagagcagatggaggtggcttgctggtcaatgcccttcagaggaaagatcagttccccaccagaggccaggaggcaaagcaacaaggatgttaaggatggggttggagagtactagtttcacaccaggtcttcagctgcaagcttccatccctgcggtagtctaggcagcctccacggggactgagaagctgggagtggctggtgtgagctgcagccagggggcatctctccgagctctccagcctctgggctgcgcagcagaaacactgactgccattaccagggcagggggtagggttgctggcctgcctaccaacctccccagttccccagggactgactcttggccttgttccgagggcacacacggctggtgcctgggcttgcagggttttatttcatggatgtctccaaaagcctctacctgctgtggccattgtggggaaacagctactcgtctgctggctgcctttggaagctgtccccctgtaagaatacctgtagtaggcttgagtggtgtccccaggttgttttcatggcgtgcctgcgtataactgtggatcccttcgcactttttgatgtcctctctgggtgggctgagccttcatgtgtatggcatggcccatgtggctgccgagtagctgtgaagagtctgctggaggagccatctgtgagcagctggtagaagcatttctaaaaggtgcctgtgttgacaaaggtgtgtcattttcccattttggtcacagtgcataatgttagagggcagctggctttgtgactgattgcctgtaggattttgtgaaatgctgtgggtgaagaaaatatcagatccacatagcaaggttgtatctggtgtttacaaagtatatgtattacatacacagcaccgaggttggcttggagtttaagcctcctaaggtaatgcgtccaccccacggatctccagtgctccctgtgactgactggtagaaattagtagtgcagggtgaccctcgtttgatggggccacggaactacaaagcaaagggcgatcttaggcaccctcccagcagaaggtggaactgggggccacatatccctccatttagagatgtaagtagcagtatcactgcctttctttaatgactgtgagttatagcaaggaagtaaaaaactgttccagaggcccacatgaaacatgctgtttactttaattccccactgaaaaatcagttgtaggagatcaccggtaggcattcccagcaggcttattgtaagtcctgggacatgacaggaacagggttctgacctgcctttcacgtggccatttaagtgatggcaccaggaccttagcatgacacagagtcctgagctctcttggccaggacgaaaggagccacaggagctgagtattgtggaaggggtctatcgtggttgtctgcttctgggagagggggctccagggctcccctcccctagcaggaatgaaggtgtgggcataattcctagtgcacggcattcttccaggataagttgtcctaatgccacgaaaatttttgtgctgctctgaagcctcatgtcttagctttatatacttgttaatctgtgccttcatgagacctgtgtctgggcaaaaaggagacattccttcagataagagtcagcaagtcgatgaccttgccaccttatgactcagtttctcttggttataggctgtgcatgtgctggaggcacagggagggcagtgtgtttctgtctgaaatcaggaggactcacggtcatacagccctgcttaaaatattgcctatttttttcttttgaaattatttttgtttattaaaaatgtatgttaaacttaaatttttgataaatggttgctttctgtggcaaaaatagtctttctttctggctaagaattttcttatccatgcagatttactaaaaaatgtatatttagttgatctaaatagatatcagtttttctttgggctgggtgcggtggctcacccctttaatcccagcactttgggaggctgaggtgggttgatcacctgaggtcaggagtttgagaccagcctgaccaacatggagaaaccccgtctctactaaaaatacaaacttagccaggcacggtggcgcatgcctgtaatcccagctactctggaggctgaggcaagagaatctcttgaacctgggagttgcaggttgcagtgagctgagattgcaccattgcaccccagcctgggcaacaagagcaaaactctgtctcagaaaaaaaaaaaaattttttttctttggcttttattctctatggattgtaagaatactaaaatcttttttttcttgaattccgtttattgactgaattgtattttatagttttttttggttgttatttaggagagaaacatggtaatgttctgtttctgcaataagatttaataagtagtccacaaatggtcctactcctcctatttctcctcctataactcaaaatttgtaaaactggaggatactttatagctcaatccccaaattttatagataaaaagtttttttcttaatttcttttgtaataggagggattaacttggagatgaaattagcaataatatctgaaaatggcagctacagaaaaaaagaaaaaaaaattagcaataagacaatgtctgagaacaaggagtcactgaacatattttgcctgcctaaaaatagtttctataaataattactttaaaaattaggccaggtgcagtggctcacgcctgtaatcccagttctttgggagactgaggctggaggatcacttgagactaggagtttgagatcagcctgggcaacatagcaagatttctgtctctatttctagtttaaaaaaaaaatgaaaaaaaagtaaaccctatttaagttaatattaaaactaccaatataatattgaaatcatcattaaacataaagtgttgaagttaaatggagagagaaatatatatgaccagcccttgctttactggtctttgttccatttgagtaaaacaaagtgccacatctggaattgtttaaaacatggaggtggtaggggtgggtagagagagacaggtatagatgtagatcttactactggtcagatttggacgtgctttaaaggagtgataactagagttggagatggctccgcagagtagaggaaattaaaattagttaggatttttgcaggggaaaaattgggatagaggtatccaggaaagaagaaggcataggaatctttggagctgaagggaaatagttagttcattgtgactggagtgtagggggtaagaagccaaaggcaggaagtgaggctggtagaacgggtggaaagtagatacttgaaaatatttcaaatcaacgatggactttatttaaatcctgcttcggtgacaaatgtgttttctgtctgtacactggagtccaacaattaggaccttcttactggagcgttctgtattttgataattgatgtaaacaaatgtagcatgctcctgcttgtcaagtttacaagcagagtttcctcctcacaattagggaggaaaaacatctgccagctgattctatgcgctgaccttctttaggcctgtactgtaatttctctgcctccagggatcctgggggcaggatggttggagtggctgcctggctacctcttctaatggaaacatattagacatggtgtattagggataggaaatgtgtttcctcacctttgtggggcattgctggtgatatataacttccacaaagagaggtggacaataggctgagagatagagacttaggttcctcgccagctgcatctgggcctggatgggtgggccttaaccactcttttggtctgtttcttgctagtaaataggcgtcatcgttcccgtcccctgtgtgcttctgggacactgtgtgcttagctagacctatttccctactgtagtcactcctgagctgcgtggtcgtttgaaggagttaagcacccataagtgcttgtggccaacagcagtgatctagagactgactcaagttaagattatttgatgtgctctataaggcctctgaagaaagcttaggcaggtaaatattttaaattgttttcatggattttatttcatatataatatttgcatcctgtggtggaaatagaaaaacaccttagtaggtcctgtagcttactatgcattttccagtgcaggggggttctttattagcagatttacactccactgtctttttcttcaagtaatggaatttttttttgatttactgtgcactatggttggtcacaaaattatagttcctgtgaaagagctgaaaggaacatttgtgaaggacttatgctgtgcttatactgttaagttgctcagaggaaagtatgaaggcgagctctgatgcaagagcctgctggggctggagcagaaaattagtgcttcatttttaacttgaatatgccacagagcttctagaggactcgagagccaaacagtggtggattggtcttcgattttctcatagtgatcttgctttgaggaagtttttccctttcctaatactcactcacttataagatagtgaacatagggaggcaggaaattagtttctatcaggtaccttttatgtgccaggtgttttagatacattttattttttactcctccttctaagtgagatgcagaaggtaaagaacagttccaaggtcacgtgtcaaattgagacgcgtggtttcacgttggccgcaggtctggctgatgcggtcagtgttgttgccactacagcgtgttagattaatatgcgatattagttcatttctttgaaatcttcagagagaagaaagaatgttttcttaaagaaattggactagtttgattaataattttagcatcacatatcctcccactgaaacaggtgggaaaactgtgagaagttatttgctcttgaccaagaatgtatttaagacagttaatgcaaattttcttatcaatgttatacttagaaatcaaatgtgtaatggtactaagaatatggcagttgggtaacattaagttaaaaaaaaagtagtaaaaattacttttgttgacatacctaatgtggttataacaaggttcttttaagagaaacacaagattgccatactgaaatccttctaatgctgcgatttaaatccatacacaaacaaatgctgttttggaacttttcagaatgttaaaattgtcttcaatgaatgtttatgaagaaattactgaaaaagcatttcttaatagtgaagtgcctgttttttttttcagtctatcgtccaaaacactcttttctaaatgagtagcaaaggggttaaaaaatcattaatctcccaaagggtctgtgagagagttatgtggttaggtattattattgcctcatttataaaccaagatccggagtgactccttaaggtcacaaaacaagccagtattgaagccgggactggaaccgacgtctcctgcctcccagtccagggctgttaccactcccagggagttgaccaatcatcacagttattaatatcccacttgccacatgctacaagccatgaacataaatattttgttggcattttatcttcatgctccctatgtgccaggctccctttctttctatgttcacagccccttctaataactcacgttcttgtctgaccacattggcctttgcgtgaaagtcacacgtcaccccggcagggaatgttcaagcatgcggatttgcatactttcattctgatctcaaggctttttctagacttcctttttttttttttttaaatctcgtgtgtgtgtgtgtgtgtgtgtgtgtgtgtgtgtgtgtgtgacagggaggatggtaagaagtagtttaaaaatgcattgtgtgctacatcaatatccaatggctttgtacattaggaaacagtaaagctttaaatagtttgtaacatatgtccacataatttatcacagaattgtggtttatttaataagtgactcattatcactatctgatagccagaatactggataaagaataagtgtgggcagaagttattcaccatttcttatagcctcatcccagaatacagctcttctttgcaaattacagattctttgcagttttctcccacccgcccccccaacgcctctataagaatatacaaaattgtcagaaaacatgaaataatgttacgggaaaacatggccaaatttaagaaatctggcttagattgctctgaaaggttattgctaaatgaatcttcgaagaaaacgaattcctttactggaacaaaagtaatttattatgcatttcatgggtgtctgccagaagagttactagcagtatgaagatccagtggatatgaattaagtacaatctgttagttctgttcatgtttagacctacctgttaattttctctgaaattttaataatttaaaaaagcatctccatagacaggtgttggcaatgtgacaattcaccactcagctacccatcacatcaggcttttttaaaggcccagtactcagaatttgtgagactgagcacaaagacattattttattgacctcatattttaagaatgatttggacaaatacataactaggcattgattctaatgtcctgttggggtcttacgagtaaacggttccaagtcaacatctgacgatgcttaaatcatgatccgacttgatggtgtgctgcctgttttggttgttggcctggcacggtttcaccagagctgggccacatgctgcagaaccatatttttattttattaaacacaagtattttacatttaaagctctcattaaatttagttgcttgattcgtggtgaagcctgaatatggtcaaaagtttattctgggggttcacggattagcagctgggaggaaacagattccagcagccaggcgctagctccagctctgtctgtgtgagtatagcaagctgccaaggttctgtaaagcctctgttttcctccttctactaaaggggaaaagtaattcctaccatctggtccttaggagtattgtgtagagtgagtgggagatgcctggagacctctttgaagtttaagaagaatagcactacttaaatacgggtcttggaagttaatagtaatcagctttatttgcgtggcattttttttcatcccaagatattagaataagatcctcactttcttaatggggaaatttagagacgtagagttattgtgttaagaaagtaaccacattttagagatttgtatttcactgatagcaaattttttattccttctgatacttagtactttcctaatgctttttgtggtttaagtgcattgtaaatgcttcttggtatgttttctgtaattaagatggagagattaagatgctcatccatctcctgaaaagtcagttttgttataaaaattaagatcataattcaccaggttttaaatcttgcctcaggattctgtcccacttaatttgaagattagaatagtgtaattcattctgattcatttagaagataagctttttctttagggtcctcattgacttcaagttgtgggacaaaccctctcccttgcaatttatatttgtacatgagtattttggtgataatcccagagtacttataaagtttggcgcctttcttcaccacaacatgcttgctgttgagtgtgcacagatacataaagcaatttgctcttttgtccagaatagattatgtgcatagaattgctttcgtcttcttgaaaagggcagcatcccttggtgtggctataaccttgcctactcaggcctagaaggggcgagaggggtatgggttggggcagagtgggggagcagccggtgaaatttccagtaaggaatttgtttgccgaattaaatatacaaaactattctgctgaatagttaggtcatcagttgaggtgacggtgactctctctctagagaaaaggtgtccatgttcctttgttttattaagctgttaagaattcgagagtttcattgtgattggttttcacatgtcctggtggagacagaatttgtgtgtgttcatgtgtctttcatgtgtcaccttctaaactattactgtcactttgtatctggtcctctgttacctccagccaaactgaaatgatcgtagtttatatagtggaagttacgatttgcaggaaagcatttcccctttgttggaatttatacaaagtttttaattcctctttggaggaaggcagctataaagcaccacaggagtctaacctagaggttacaaaagcagagaagagctttggcagtgagggacggctggcttcccctcacacaagaaaaagccgtaagcacagtctcactcagatgtgtaggaaggacggatcagaggctgggggagccgacagtctgccttgcagtgaaggaggcatgtgatcaccatcaaagtcttctgctctgggaaggatcacacagtcgtccttcagcctgcctggggcgcagtgttttctttcctcagaccgaaactgcatgaagagagattccagcaaggaagatagagcatgccccgtacactcctctctggttttcttcctcaaaggaaatttatgcatgtaatccacaagccgaagaacccatgtttttctttggaaaaggctacgccctttcagggtttccttttctcggctgtgttgccttcccatcagaagctgtctcttgccctccccattatgggatgtgcgaaatgaaggaaaacagagacactgctgggcatttgtctccatgagttgatccaatcagaaatctttgacttttcagatatgtgtccaaaaatgagtgaaggctcctcacaggaaaaaaaaaaaaaaattctaggtgatctaaagatgaactgtggctacttctcaggctagcggatattttccatgtcccaatctgtagcagcccaagctctccctgaagtcatttactcctttaagagggagttttccagcccagctgctctgcctgtctcccacctaacccggccagctttcagtgctaagcccaggctgggtctggccctgataacacattctttcaacaggaagtgcctccattttcagttgtctgtgggaagggtggagggcaaataagccttgaatggaaacacagagccgatttctgctccaccctccttgcactttgatcagggagagagcagggacctccgcctggcctgtgctgcctgccgaaaggagggaggatggttgagctgtgggcattccggagctctccctcccttttgttcaggaacgtttgtttaggttggtctaggttagtgaagtgcctgcttttgcagggttgtgatgtctgcgatctgaactaaagtcctttgaagggttgaattatttgtgggaaaatatatcaaccaattgaaatttatacgtgtgtttgtatgtgtgtgtattaggtccaggatcatagtatatttttctctgatttcccccctccgcccccccctcccaacacacacacatcgtgttgattctcagtaggcatctcttgactatcatcagtgagggaaagggacttaaaagatgaacaataacaggacaaagccaggcttcttaagaagagtagctgtgccaactctgaacgccttctacttttagaatattggtttagaggccaggcacggtggctcatgcctgtaatcccagtactttgggaggtcgaggcaggcggatcacttgaggtcaggagttcgagatcagcctggccaatatggtgaaaccctaactctactaaaaatacaaaaattagccgagtgtagtggtgggcgcctgtaatcccagctactctggagactgaggcaggagactcacttgaactcgggaggcggaggttgtagtgagccgagataccaccactgcactccagcctgggcgacagagtgagagaatatcggttttgagagctgaagttacgctgatgcatggagctgacgtgttgattgttttaacttgtatagaactgtgagattcacatgtgcgtggctggccaggccctggcctgtgccaggtggcagggagatgatttcaggggcggatgggggcccttctgacccgccctcctgttagtgcctcgactctggttccctcctattttttcaagccactttctgatcccatgaaggttggcttgtccctcaagtgccttgtgtttctggtactcatgtcttctattcatccccaaagttattaggttggtgcaaaagtaattgtgggttttgtcattactttcaatgccaaaaactgcaattactttggcaacaacctaaatagatttactatgcaattcaatttaagtattcaaagaaaaatattcaaagaaaggtatagatggctaatagacttggccctctcagctagtcccctgtttctcccctcctcccaggggacctttgtaatacttacacatgtgcatggataaattgcagttatgacgtgtaattcatatcttgctgtttttcacttaacatggtattacaggattttttccattttgctccatgatcttattatttttaataattgcataatagttcattgagcggatgtgccctgcttttctaaaccgttcccatattattagacattagattgtttctatagtttctactattagaagtaaccttgcaacggttggcttcctttgcggagcctttcccttcttttgaattatttccttataatacatttccagaagtgaaattatagggcgaagtagggtctaaacttctggatggctcttgacattgcagctaactgccttctgtaaggtgggtgtaccagaatttagctccgccagccatgagtgaggggactggtgttaccatgtaagtaacatcagcctttctttgcagtatttcatgtttaaatattattatatgtacacataaaataaggctaccaagcattgggcacaaatacttgccccattttttttctgacaggctcagctattgcttttaattgcaaatgagcagatttatttctaggagtgcatcactcatggaatttgaggtctgtctgccctttgatagcaggactcttggcctgccaaatagcttaacattttgtctgaaaaaaagacaggttattttcgccaattgcttttgggattgttattcaggtgtaagaataacattcagggtgttaacgtttctttaatgtgggttgttgaaaaagagtcagtgagtcaccaggtgtggtagctcgtgcctgtgatcccagcactttgggaggctgaggcaggtggatcccttgagctcaggagtttgagaacagcctaggcaacatggtgaaaccccatctttacaaaaaatacaaaaattagctgggcatggtggcacatgcttgtggtcccagttattcgagaggctgagatgggaggatctcttcagcccaggaggtggaggttgcagtgagccaagatcacacccagtgcactccagcctggatgacagagcaagaccctgtctcaaaaataaaaaataaaataaaaaagagaaagagtcatgagacttttgaatggctacagaacactttgatttatttttgcgaagaactgtcagtgacagtttgaatagggtcattctggaggtggttctctttgagctccaactgtgttccgactgcttctgcccctgcctggtgatggggtaacttgcttgggctgaaggatagaatgaggagaataaattagatccaagcctcttaaccttaacaataataattagataacaagagtagcttatactgacataatctttactgttctcagacactgttacaagggctttacatatattagccaattctttttttttttttttttgagatggagtttcacttttgttgcccagactggagtgcaatggtgcaatctcggctcactgcaacctgcctcagccttctgagtagctgggattacaagcatgctccaccttgctcggctaatttttttgtgtcagtagagatgaggtttcaccatgttggtcaggctggtctcaaactcctgacctaaggtgatccacctgcctcggcctctctaaagtgcagggattgcaggcgtgggccaccgcgcctggcctagccaatttaattcttgcaataatcttatggcataggtgcctctttttatcccactttataggtgtggaaactgaggcacacaaagctgtatgtcaggcttctggtttacctctcccacatggtctgttcactcttttgcttcatccttctgtttttcagctggcttttcttctgaacaggccaggtgaccacctctcttcatccgccctgcctcccattttgaacatccttctctcgccaataacaatagcttccctttacggaatgtttaacatggcaaggcaccttgccttcgcttttacaaacgttagctcatttaattgtcgcaaccatccctgaggtgggaaatgtgaggacccaggcacagaggaggctcaggggggactgcactcagcaggggactgaatcaggacaggacttgagagtccaagctgcttcccctccttctcatactcctgtgtgggctgcctttggttccttgcccaggagtccttgccctctgctattccttttctgactcttggtctaccttcctgtctcagccactcatttgttgttcatgataagcagccaacagtcgactttctaatgtgtatggatcctggctccccacaaagcctgggagctcctggggcagttgactatctttcaggctcctgatctagtgtctggctgtcagttgttgctttgccaatgtttctttttttcttctctttctttctttttttttttttaatttttactttttagagacagggtcttgctctgtcccttaggctggagtgcagtgatgcaatcgtagctcactgcagccttcatcacctagactcaagcaatccttccatctcggctccccaaatagctgggactacatgcccagctaacttttgtattttttgtagagacggggtctcccaatgttgcccaggctggtctcaaattcctgggcttaagtaatcctccctcctcggcttcccaaagtgttgggattaaaggcacgagccaccgtgcccagcctgcttatgcttcttgttgctggctgtggtggtggtgacagatccctctgctgtcttggcacttccctgccatttgagatgggctatttcctgggccagttcaggaaccctctccatttcagaaaataacacttgttgcggtgaagtcagatttagtcagaggcatatgctgatgtgcctgttttcgaataagaaaatcaatgcaaagttggacgtgagatgtatcattataaggaagctcactctaatagttcctttctaaataaataattcttttgtaattgaatatcatccttttgcttatttctttgagggttaaatctggatccacactggatttgcttctggtggagtctctggaattaagggctaaagttaatcactatgtttataagtataaccaagtttatggcattcagtttgttggacaggattattttagctttttcagaattgccacaagaatccatctgaagctttagacatctcactgatttttgtgaaatttgctttttaatgcacctaaaaccctcagtttaagtctttacatttgtgttatataaacaaaagtttgggtgtggggccagtgttgttgctggattttcataaaacctcatttctgctgggaaagggaaggagtggttacctgtggaggggtcgggtttggtctgtctggttgggaggaaggaagtttgggtgcttagactcagagggcttgctcgcctgaagtcctgcctcccagcctcatgcccttatggtgagggttgagagcaaaccagatcttgttggaaaacgagtagagttggacctcattcacttgcaggccgtggaggctcggcacacttcctttctgttccgcctgtgtctggtgccagagaaatgctgttttaaggatttaatgggattatgtatgtaaaaaagaaattctgtgaaaagtacacaatgtcctacctctgtcaaataacaagtatctggtaatttatagaatggagccctgaaagcttggaaggaataagagctcctgaacttttagaaggaaaaaggtgattttaaaaagtacatgattatggcgaaatttttcaaaaagcttctcaaaagcaactttattcaaactgttgtctaaacagattttagttattttggtttgattttactaaattatatgatgtttcctatttggcctttttcatgtgaatgggaggaatgggtggaacagggcaaaggtgaacttgtgcttcaagaaatcattgtggccaggcacagtggctcacgcctgtaatcccagcactctgggaggcccaggcaagcagatcacctgaggtcaggagtttgagaccagcctggccaacatggtgaaaccccgtctctactaaaaatacaaaaattagccaggtgtggtggtgcatgcctgtaatcccagctactcgggaggctgaggcaggagaatcacttgaactcaggagatggaggttgcactgagctgagatcgtgccactgtactccagcctgggagacagtgagactctgtttcaaaaaaaaaaaaaaaaaaaaaaagaaagaaatcattgccatgatcatggcagatagaggatgttagcattttctttataacgtggtctgcttcagacatggactgttcttgtaaagaattaaggtaaatgaggtagattttaaagcctgtatatgcataggtttattttccatgaagtcaatgttcaaaaatttcactgatcagggaatgttgaactgtgcagcttttctaaaaagtctaaaaagactttgccatcactggataagccttgttagagtgtgtgtgtgtgtgtgtgtgtgtgcgcgcgcacgcatgcgtgcgctctgcattttctctttggaaatgatcaggttgtgtgtgcatcattaatgcctattcacccacacagtgaggtttgtttcacagtcagagatcttagagcttggcactttttacaaataggatttcttcagttccccttccttttgtccagctttgcatcttgccagtggctcctgccctgagttctaaagtttcgaaggcttaagtggccagggtcaggtcagtggcactgtgtgcaatgcagggaaaggcccccacttgctgggggcaggggatagtaacgccggcttcatttctcctgccctgggtctgcccaggagcagctctggccctggctgcacagaccccgttcattagctcccatgtatttcactaccaggattgtaaccgcttctcaccttctcgtctctcctctgtgtccccctcttctgccaggcgggtgccccggtgatgactggtgcgggagagagcaccaatcccgagaacagcgagctcaagtattcgggtcaagatgggctctacataggcgtcagtctcgcctcgccggccgaagtcacgtcctccgtgcgaccggattcctggtgcgccctggccctggcctgagcccacgccgccaggaggcagggagggctccgccgcgggcctcactccactcgtgtctgcttttgtgcagcggtccagacagtggcgactgcgctgacagaacgtgattctcgtgcctttattttgaaagagatgtttttcccaagaggcttgctgaaagagtgagagaagatggaagggaagggccagtgcaactgggcgcttgggccactccagccagcccgcctccggggcggaccctgctccacttccagaagccaggactaggacctgggccttgcctgctatggaatattgagagagattttttaaaaaagattttgcattttgtccaaaatcatgtgcttcttctgatcaattttggttgttccagaatttcttcataccttttccacatccagatttcatgtgcgttcatggagaagatcacttgaggccatttggtacacatctctggaggctgagtcggttcatgaggtctcttatcaaaaatattactcagtttgcaagactgcattgtaactttaacatacactgtgactgacgtttctcaaagttcatattgtgtggctgatctgaagtcagtcggaatttgtaaacagggtagcaaacaagatatttttcttccatgtatacaataatttttttaaaaagtgcaatttgcgttgcagcaatcagtgttaaatcatttgcataagatttaacagcattttttataatgaatgtaaacattttaacttaatggtacttaaaataatttaaaagaaaaatgttaacttagacattcttatgcttcttttacaactacatcccattttatatttccaattgttaaagaaaaatatttcaagaacaaatcttctctcaggaaaattgcctttctctatttgttaagaatttttatacaagaacaccaatataccccctttattttactgtggaatatgtgctggaaaaattgcaacaacactttactacctaacggatagcatttgtaaatactctaggtatctgtaaacactctgatgaagtctgtatagtgtgactaacccacaggcaggttggtttacattaatttttttttttgaatgggatgtcctatggaaacctatttcaccagagttttaaaaataaaaagggtattgttttgtcttctgtacagtgagttccttcccttttcaaagctttctttttatgctgtatgtgactatagatattcatataaaacaagtgcacgtgaagtttgcaaaatgctttaaggccttcctttcaaagcatagtccttttggagccgttttgtaccttttataccttggcttatttgaagttgacacatggggttagttactactctccatgtgcattggggacagtttttataagtgggaaggactcagtattattatatttgagatgataagcattttgtttgggaacaatgcttaaaaatattccagaaagttcagattttttttctttgtgaatgaaatatattctggcccacgaacagggcgatttcctttcagttttttccttttgcaacgtgccttgaagtctcaaagctcacctgaggttgcagacgttacccccaacagaagataggtagaaatgattccagtggcctctttgtattttcttcattgttgagtagatttcaggaaatcaggaggtgtttcacaatacagaatgatggcctttaactgtggctccctgagtgtacagtatttttttacttcttttcatgcacttattacagtcattctatggggttcagtctgaatctttcaagagaaggaatgtcttccttagtcctggtgaatgctactctatagagggacagtgtccatagccagtgtgtgtgtgtgtgtgtgtttctgggtaattcagtaaggcccacgtgcaccctgatatcataaggtgggccagaacaatggttaagagtgttgggtatgcaggcagatcactaggcttcaattccctgcttggccgtggataagctctgtgaccttgggcaagttatccagctctcatctttctaatataaaataaaggcaaatagtatataaatcacaggattaagtgagatagtccatgccaagtgcttagcacaatacctggcacatattaagtactaacttgactttgaaagagagtggcatgatttgcaacatagatcctttgaataatgtctgactacctggaatatcagaagtttatggtctgtaagagtgatgtcctgtgggtcacctgtgcttcttcaacaaggccaagaagagtgaaatgaaagactccctctaatccagggggttgcagaaatggagggaggatgcatgagagctgattgttttataatagaacaaggctgttctgacaacagaagaaaattattatccccacgaactgatgtctgttttcctccctccttttatggttctcattactttgagtgctttttggtgggttgggagttgttaaagttaatatggtttgattggaaaatgaatttttctttttggggcttccaaatgaccctttttctgggataatctcaaatattgctccttccaattctaaaaagaattctagtttttatgaaacaaattacagtgggcagaagacagagggggcttcttgtagcctgtcctaacacaatgaactccactatctgtttttaaatgattactttcttacctatgattgcataaagaagtttgttaaatttgctccaaatacacaatttcagcactcctctcccaaagtatgacatgtgcaactgaacatgacccaatcatttctcaaaagggaatgcattcaaatagatgctgcacctcagcttaaagaatccccagaccgtatatcgtggactggagaatttatgtcttctgtcacacatggctgatttgaggccatcttaaataagtgaaggctctgtctggggtctcttttcagggtcacttaatgttgtttcctggtgcttatgggagggtcaggaaagcaaagggaaccattcatttcccagtgcaaataaattaacttcttgctcatgggaaatgtttttcacagtccttggaaatttgatgtaatttcagatcacagataaattggctgctttgctgggagggcaacccagcgagtcttcaatgctgtgccagattccagggtgagttcaggttggagcagtgtagtggggagaaaggtggcaggc

SEQ ID NO: 222 - DNA, 48152 bp, Homo sapiens
  source 1..48152: mol_type = genomic DNA
cagacaacctcctgggctcaagtgctccttcctgcctcagcctctggagtagttgggactacaggtgcacaccaccctgcccagtgttttttttttctttttttaattaattaattcatttttgagacagagtttcgctctgttgcccaggctggagtgcagtggtgcaatctctgctcactgcaacctccgcctcctgggttcaagcaattcttctgcctcagcctcctgagtagctgggattataagcacccgccatcatgcccggctaatttttgtatttttagtagagttggggtttcaccatgttggccaggctgatctcgaactcctgaccttttgatccacctgctttggcttcccaaagtgctgggattacaggcatgagccaccgcgcccagcagtgcccccccgccccacccttttttttttaagagatggggtcttgctatgttgccccaggctggtctcaaattcctggcctcaagcaatcctccacctcagcctctcaaagcactgagattataggcatgagccatcacactggcccataacaagtgttttatgacacctcctttgttatctagaaaagaaattcattttatctatttcaattcagtcatataacctacctacgaatagaattttaataattaatacaatgtcctgaactgtaatataaaggagaaatagaaagcaattgatattaaaatgtgttccactctgtgaatgcttgagcataacagtaatgataacaaaataatcagatgcttgcaccaacttataaggaataatttagactcaagagaactaagaagagccaaagcaattccacatgagaagtagcagaaaacaagaaatctgaagggggacatgacttttcaaaatcacaactttgggttatgatctgaaggaaacaaaacagttgttcctaattagctgggtaatatctctcatcaaaaaaggaatgcatgaaaatcacacaaatatgtttctatgtcactgtattttatgctgcagaaagatggcattatgcctacgcttggctaactctaaataggcgttccactgacaggagcatctggagggaccttagaaatccaacatgtatctgggcccctactcactggcaaacctaagtgactctgactggacaggacggtgctgagactgacctgcagcaggaccagcctcattcccccacttctccagagcagcacctggcctggcactccctctgcacacattccatgggcaggcaagcaggggcccgggccaggcagtgtactgtccactgctctgccatcccccatgacaccccattcctgttcctacagcctggtctgtcactcctcacactccccttggcacagatggctggaggagctgtctggagggcattgccgagatactgaagtgtcttcatgcatgtgacgcagactctttatagattgtccccacagtcctaatgcacagaagtcaaagaacagtggacaggccatgtttaaaacttttaacatttttaattaaaaaacccacacaatcttaggttgggcatggagagggtggcatgtcatatgatggggttgtcccttggggtgtgctgaatgctgcttggggtttcttcctgagccagcgctatgggagctgaagatgtagggctggcccttctcccctttgtgggccccttggggcagaggcttgggggctctgtctcttgcacctgctgcgagggtccatcccagaatcacaagccactcagtgatggtatgggagagaaaaggtctctgggggtattcaaagcttgggacacctcctccatggagccccctcccattgctccctgggcctcttgagcctcaggcaagaaaatggccaggactgggtgatgagcagcccctggctgcccttttggcccaggtctaggtctggtcaagctgttggagctgcctccccacacaggatgagttcccagggaagtgaggccacagcaggatccagagggcaccccttcccagagcctgggcccaggcgaggccaacagctctgacagtgtggaaatgcatcaaagtcctgagtgagcaactcccttctgggaaattgattccagcgagaaaggtggggggcttccagagtctctgttcctgctcctgccgcacccccgttagggccctggggctgtcccaccgaaaaactgagggaagaggcccgctctgttccccagcggtatggcaggcggcctgggtcctgacaaggccaggcctcctgccccgccaggctgcgagcacgtgtggggagcacttccccatggagcctgggtgctgtggggctgtggcatcctccctgcgcttgcggccactgctctcactggcccagcatacaggccttcttacaggccaccgccgagaccagggccgcgccccggccactgccctcctccgactcgatgaaggtgatctcgcagctgggcgtcagcctgcgcacgctggcatggaaccgctccttgaagctgggcagaagagaagcagggctgccgtccctcctcccacctcatcctccacattcattaccgggcgccctgcacgcagtcgacccttcccccaaatctaggccaagggggacgagaagaggactacgaaatcttggagcttgggaaccgcaaggaaccttggagcgcgcgctttttgggccccactttaccagggagagagcggggcgggctcacctggggtgcagcttgtacacggagccatccacgcccacagtgatgcgcattacgtcctcgctgcggctctcgcgcatgcggttgatgacgcccgccagccccgccgagcacatgtgcgcagcgcgcgtagacacgctctcgcaggcgcggcgcacgatgtcgcagtcggtggtcgagggtcgcagccccagcgtgctcaggatgttgtagatctgcttgcggtcgcccgtgtcgctgcggggcgggaggaggtagggcggtcgctgagtgtcgctccgacagtccatccccctccagcggcggcctctcgttctccagggaggggccccggccagccgtccccccagcggcggcctctttccctcgctgagccgggacccctctctggagaaatgggggcgatcccgctcacctcacccagccaaagcgtttccgccagggactggttagtactgccccctctaactaagcccagggtctccgtcctaacgtgggggtgtcaaccatgccgcgccttggggttgtgagtgatgtgagaggatggccacggcgggcagggagcaccgaggggactcacggatggggaccagtgcccggacgcaggctcgctcccatccctgctcttggcatccccgtccggaccccgcctcctccccttgggccctccccctcctccccgtctcgggccccgcccctccctttgcatccccgtcctgtcccagcctcctgcccttggacccgtccctgccccgccctcgcctccagcgcccggcctcgggccccgcccactcccccgccccctgtgccccgccccgggccccgcccacgcccggaatcccgccccaggccctagtttcccatccctgcgccccgggcctgggactcagcgtcgccctgagaccaagtctgcagtgcccgggcgtccccagcccctgccctttgcacccaccctcctcctccgcacacctctccacctgcgacacgaagcgcgtctcgaaggctccgcgtgtgcgcagctgctcggaggcctccccgtggaagagcaggttttcgtccacgagcctgagcagcacaagccgcaccagctcgcccatgtacttgccacctatgagcttctcatacctggacatagggcaggtccattacatcagcaggcacgagggagggcccctcatgcaggtggaagccgggagccggccccactgctccccactgaggtcacgaggcggccacgtggggcactgcgatccccactcccccagctggttcacgtctttccctcgttaatgagccagagctttagaaatgtcagggattaggaacgtgcacgttcaagtcaatcacgggagcaactttggcctgcccctgggcccactgcagtaaagggaaagacagatagttcaaagaccccatccagtccctccgaaaccttccttgcagggggccctgcgccgagcacgggacctacagcttcagtcttcctttagctgcatccagagctgctgttcattggccagttatggttgggaaaactaagacttggagggttagtgcccagtcagaggcacgcaccatgttgctggcactttcttgcttaatctatgaccttccgtatttaatttaaataaatcgaatactactgacctataataatagaggcctgcgagcggcagagaggacgctaataaagtaattagcataggcctggcacagtaggtggtaaacaagtgatagccatgattaatgatgagctctctgtgggttggtttccaagctgtgactgtcaacccgcagcattccacaaaagactaatattctttctgtgaatgtggccaaatacatactttggggaatgttgggttaaacccaggaaccttgctgggggcgtctcagagcctcctctgcatgcacgatcacctgtcggaaggaaagaggtctgggcttatcacatcacaactgggactaacccttcatctctcacaggggcaggtcatgactgagcagaagggatggagcttacgaacggattgtcagtttgcttttccccagagttgtttaaaaacaagcccattatctgcaatggcccggctcccatctgccgctgcaccagagcggcccagggcctgggttgtgggggaggggggcatccttacagctgctgaccggggtttgcagagctctcgtccaccaggcggtcatactccagcaggaactcgtccagctcgccggagtccccgaaggcgccccactcggtattgacgcacatgcggccctcgtccccctccaccagctccacattctgcatctcctccatgtagcaggcattgcagcccgtgcctggggtggaggtcggggggactgtcagcgagagctgcactgccccggagtagggcctggttcctgcccacaggagtccctctcccgctcccccatgcctgtctctgctttgtctggaacaatggaaaggcggctctccctggggctggaagacctgggttgcttcagtggccagggacagctttcagggctgtcctctttcctaacaggcaacagtaacaccttccctgcctgttacctaggtggttgggaggactgagagaaacagtgtgtatcaaagaaatggttgtgggacgttatcattttattttgtctatgtacgacccttgttttctggcactgtccatgcacatgtttgagcttctttgtcatgagacatgtttggatggcaacccaaagtgagtaaggcatggtgtgggcccttgggagcagcccagaggctcctgtagacaattccggatatggaattttgtaatttgctggcccctgtgcagagtgacaacatggagtcttttgttcacaagttattaagagtttcaaactgctgacagcagagcctcaagctagcatgactgtgtgggctgcacacccccaaagctgtcagggacagcaactcaaatgctggtcagtcgagctgccacataggaatcagggctcagtgatgcttagacttccagtttttatttatttatttatttatttggagacagagtctcactcactccatcacccaggctggagtgcagtggcgtgatcttggctcactgcaacctctgcctccagggtttaagcaattctcctgcctcagtctcctgagtacctgggattacaggcatgcgccatcacacccagctaatttttgtatttttagtagagacgaggttacaccttgttggccagctagtcttcaaatcctgacctcaagtgacccgcctgccttagcctcccaaagtgttgggattactggcgtgagccaccttgcctggctgccttctagttttttatgaacaaacagaaatccagactttgatgtgaattctcctaattttcagatcttggtaattgttataaacatgtttttaaacactgagcagagtcaagagtggatgtggggcagatgtgagtggtgggtcactccttgccacctctgccccaggaggggttatgcctgggcccagcagctgcagcttggcttggtgggaattcatgtggaagtgtcttggggagccccaggcagttccagaggatagggtggaaagggctggggggatcacagccagggatggctggggctcacgtttagatgctggatttaaagacaacgttccttctgaaaggtgaaaatggaagtaagagaagtatagaaccacacggctgtgcgcacagcagataactgatctgattggattgctcctcagtgaaggctggttataatgacctccggaacttctgagaaaggtccgagttggtgtggaagacccctctgctgggaggggcggactgctgctccctttcctggtacctgccttcactttgggtgggggcaggggcaggggcaggcccgtggaaagaccattcgggtggagatggtaccacttttgcttatcctcttccacttggaccaatctgtccagttggtcaatttaccagataagtgttttaattataatcctgatgggtgaggtggatatgcagctggcataccatctgatgcaggaatgtggcatcatggcgttgaaatgcttcctactgtacacggtgcttccatcttgataccccaagaccacccaggctgtagcaccaggctctgctctgacatcaccggttgttaagtagtttggtcctcaccccacagggcccttgaagcctgttgtacacagggagcctcagcagtctggaaggggcaggggtgcaaggagcccttacccacgatcatgccgacctcgcactgatggtcttcgtagtagcaggagatcatcgtggccaccgtgtcattcaccattgccaccacatccatttcaaagtcctgccaagaagcacagaagctgcagtgctggaagccaaggagaaaggcaggcagtgctggggtgggtggcccagggcagcccccccggcaggtacaggtgccccctcacccctctccgtttgatagcgtctcgcagaagccccacgacattgttcccttctgctcctgaggccttgaagcccttggtccagttgagaaggatgccctgtggggagagataggcctcgtggctgctaacatatactggaggcagggtgctagggcctgtcactacctcctgcacagggccataaaagtatgcaccctactttacagctgaggaaacaggctcagagcagccccatagctttgagaggttttgggaacgattctccttgaagatatcatatttctgcagggctgagtcccagccaatttaagaatgttgtactgcacagctctgagacgtcatcccagagtcaaggcagggcgtggggggagcagctttgtgtaaaatcaggatttccctcctgcaaggtaccccgctgcatgcacaggtgccacctggccctctctgtctctgtagggactggggcttggaaaaccacatgagatgttgctttggctgctgcttctgccgtgagtgaggatctggctttctccctgacccaaaggtctcgtgttttatgtgtgtgcatatataactgtgtgtgtgtgtgcatgcacagatgtaactggcaggccactttgctagcttgcaggaagggtagaatctcagttccttcacatttctgactcagctagaggcagtgtgacatgaccgtggcctgcaggtgacccagagcccggctgcctgagtttgagccccaccctactgccagctgctctttccactggagtggggtgatcatagctggtgcctcacaaggcgcacagccagaattagctaatgtgatgcttcttttccacagcattagaggtggcaggtgacatggccacaatttgaatccagatctcccttctgagcacatggtatgggggctacatttgaaggcagagttcctctggggtgcctgtgcctcccctcatctgccttctgcccctccacccggcccaccttatcgatgtcttcgtgcctcacaggaaaggagaaggtgaagcccaggggcagcttcttgtgtttcatctgatgcttgtccaggaagtcggagatgcactcagagatgtagtcgaagagctggaagatgcacgccatggtgaccatctggcatgggggggtgcgctggccggcagccctccccacggcctcaagccaagctattcctcagggacactgcaacacctggccactgaatgccaggcctgtccacagtttccctctcctcttccgctgctgcttgttgggctcaggccctaagcctcccccatgccagagacctgctgacagtggccctcgggacaaggcaacacagggcaggctggtccctggcccggctgtgctctgtcagcctagccctcccagctgaaccttgtgaggttcagcctcaggcctggccagctattcctgaggctccacatggaggcacatccttgatttctgtctccagcacccggagtctccttttctacttctaggggccctggccacccatccttactgaagaccagccccgactcccctcacacgggcctctccatggaactggatactgctgaatgctctgctgactgaccaggctcctcactggctgctggggccagggaggtccccacaccatcccactgccttgattcacacccagcccacagacagactagcaagctgcaggggtgtgaggacgggtagccacgggcagcctcctgcctcctgcctcggagccctgcccttccaggagctggccttggccatgtgcttggctgcagctagggctctggccttgcccaactccccctaggcctcattctgcttctatgttccctgcaccccagtcctccccatggtcaggggtccttgctgcctgggtagacattgtgattgctgtcaccccactttctgtgcatgctggtggagggtgaggggtggcctttggagaggggggcagtgcactggctgccgggtcacatttctgttcttacacattggtttttcctctggtaaactggacaaggtgtgactggctggggttcctcttgccactaactcttcctcagcccgttcccctctcaatgctggccagatggtgactgtgggacttggggacatgttggccagtcctgttcacccaggcctccagctgcctctgaggctgggtggtcctccagcccccgctctccccacccctggtagacaggtggcacctcccgtcaggactagctgggccctgagatcctgcatggccttggccccctgccccggcccctgcgctgctcaccatctcagcagtgccggtcatggcgtcctcggggatggagtacatctggtgtttggtcttcacgctccactgcccctcctcaccttctcccaccttcaccagcatcaccctgaagttagtgccacccaggtccagggagaggaagtccccgacttctaaaggcacagagagaagtgtgtcagcctcagggacacccacaggctggccttgggctgggtgggccccaggtgactgagcccggatattacaaagaggaggagggaaggcacaagggactaagggagctggacaaggggccaccagacacctggggacaccagtgtcaactgtggaaggggtcaaaggtcaaccagggaaaagtcaatgggaaactcctgccctggacagtcaccgagagcccagggaccaactgaggatctagtgcaatggcccagctgcagaactgggctgggagagttccctaagtgcccatggggagcagtgaggtctttttttttttttttttttgagatggtgtctcaccctgtcaccccaggctggagtgcagtggcgcgattttggctcactgcaacctcggcctcccgggttcaagcaattcttatgcctcagcctcccgagtagctggaactacaggaatgtgccaccatgcctggataatttttgtatttttagtagagacggggtttcaccatgttgggcaggctggtctcaaactcctggcctcaagagatccgcctgctttggcctcccaaagtgttgaagttacaggggtgagccactgcacctggccaggagtgagatttaaaacgccagttttcctgaggtttgccagctccagggtgagcccgagtgccccagggccggaccagaggagccaagggtgagaactggcccaagtcgaggacttcattgctccccaggagattctgtctcgggctggctgtgagtctgggagtgcctggggtgcttctcccagctagggctgagcccacagctgcttctggatgaggagccggttaccatgtggtacctgagccttctggggtggagcgcacgtaggtgggcagcatcttcacactggcctcttcatgggtctccagcctcaggccgcggtccatctccttctgcatccgtctcatcaccttcttcaggtcctcctcctgcagctggaactctgccaggatctgctctacctgcacagggagggggatgggagcagtcgggctggggagggggtaggctggggacctcagggtggggctgtcaccaggcatctgcacaccgagggcctcacggggcatctcccccacacgccatgggcctccttctgtcttctgaccccggggtcaggatgacccatcttctcaaactttactacaggtaaaaccagctggaaagtcagaagagcagagtctggtaccagccactcaacaaatgcagcccacagcgtgttggaggggtgagcagcagagggcagagtagcttctgtccctgacgatatccctgtggcacagcgtcctgtagcaccctgcttcgtccctcaggtcagagccagggaaaggaggggctaactgggagagctggcgaggtggggcttgagccacctgtctggagggtgccaggcagctggcattgctgtcagagagacccagtcctcctacttgggatttacacaagaaaataaatgggcctgtctgcacaggtgtgctaagggccagccaggagtgagtgtgagtgtctagaaggaggtgtctgctgactgaagccatctgtggcatgggcacactgggccacagaacaaagagggtccctatgcactgatgtgagagacgcctgggcacacgaagctcagatctgatactgccactcccgtgagcatggacggcccatggtgtggctgctggctctccacatggcagtgtgaggacaggccgtgagtgcagatgtgactctgcctatgcatccccagcaagctggtgtgtggacagctatgtgtctgtccactgggcaccctagtgctattcatggagaaaaggccatgttaatgtgctggttatctctgggcagtggtgagaaaaataatcataagaatattttcatcttgaatcaaaaagaaaaaggaaagatgctctgataaaagccgtggatccattccacaaaaactcacacacttttgcccacagtcttacacataagctcagagggttggagatgctctgaatcccagccaggaggcaagacggccattttcctcttcttcctcagtttctagaactcagattttgttggtatggggagcacattgcgccatgattaatctaaggtgggcacagcaattctatactcctcttactgatgatcggtctagagttgggcatttcacccagttctggccaatgacaggtgaagggaagcctgattttagcaggggaggagcttcaatgtccccctaaatttgtaaacacagctgtgtaaggatgtgatggccagcgctgtgatagccaccctgcaaccatgaagaaacaaggctggaggttaaagctgttagcatactgcaaatgtagggaagagagagtaatgccagatccaccctccacgtgcagcttatgggagcagacgcaaaccacttatgccacagtgagtcaggtgtttgtcttcctgcagcccaaagcattcctaatggatacagatctttagttaagaaccatgtctcttaatgaggccccacatgtaaaatttaaactgaggcaaggtcagaaagggatggggctgataaagtctgtgacaaaagacacagaatcaaacacccatgttggctgagcaggcactgttccgaggctgtgagcatgggtgggagtgcacgccctccccgacccctaaccctccaatccagctgcccctgcagagcacacccctggagatgtcctcagggctctgtggaacaatccaggctgtcctcaatgccccacagctacaacttttgcctcctctgtctttctttcctacacccaccaatgtagaggatgccaggaactaactgtgaaggcatctgtcatttgctgaattcctccatatgccaggccctgcattaggtgcttcacatagcagcctcacacactatgccctgtcaccacagcaccggggaggaggtgccagcagcacccatcttgcagatgaagaaaggcttacagaagtcattattgcaggcatgggcagccagcacaccatggtgaggccagcacccaaatccatgcacacaatggctactggcaggaagtcctaggacccaattataagatacctgtgggctctcaacaaaagtgatgctgctcttgcaaaggtccagccctcacacctgcctggcaccacccttgtgcctctctccaagtggcccatcctggcagccacggacctggactctggtcctttggccccaggttcttcatgggaggagccaacatttcagtctgaggtcttggcggaggacaatggcatggagcctatgcccaggtggctgatcagagtgtggctgtattgtcagacagttggggcccttgagtgatcctcccttgcagggctgtggggagaactggcccagcccttggagaataaggagagctaggtacaagttggctgttgtttctcttatcacatgttgggaggctgggccctgtagggtgtcgaggaggctcaagtcttccccctctgtatcaaggcccacgtgtggccctgccactgactgggtgaagtcctggctctactgccttctaggccagaaagttctccccgaggaatcccggtattggatgatgtcaaactgataccgtctgttcagagggcaatttggagtttctctaagtttaactttgatctgacagtttctctcctaagaatctgttctgcagcaagagggctgcaggcatttccaagatacacaggggggtatcctcttgctgcaacagtgaggaccctcatattcactgttggggactttaaatcaacaccgggacacttaccgcagggcctcttgtggcctttcccgtgaaggagacgtataggcataagtgaaaacgtgagatgggacctgaggtaggacctgatcccatttctgtaaataaagttgcatctggcctgtgaatctgatttgttctgtataatattctcaaaagcttaaatttgctgccaccacttaaaatctacttaaaatagagacacttttacacaaaaatctggatttctgtaaaagtaggtctgtattctctgtgggctgcagggaagcaggggacatggggtgggggagcctgtctccccacagtggcagaaccggccaggctctcctggcacagggctcttatctgggccccgccctagccagatgctacagggtctctgcattgtccacaccgcagggcctatgaggacccctcacacacttcccagtgggcatgggttggaggatagatgctgtcagcttccgaggctgcagtcaccagtagacctgggggttcacctctcatgtggggagcatcctccaaaggtgagccttgttcttggtgggaacaagccctttcctcagggtgcatctgggcctgcagaagttcccctcctggtgcaaccccagaggaggaagctctgacccagcttggtctcacaagcctgggggtcacattgtggagcagaggttggcttcacagactcccaggacaagcccaatggcagggactgaggctgatgcacacttcctgtgtgccagacctgctctgggcacccctccctattattgctacagccaccctgggacatgggtacttttattatctcctttttttataagtgaggaaactggacacagaggtacaaacccttccccaagcccacagaaccataggccacagaggagtttgaacccaggcactggctccaagctttcctctcacctggccaggctgcatcctgcccgacttcaggcccagcaccaagctgttcctggtgcccagaccccagctacaagtatctctctggcgagcctcatgctgggtgtctgtgcaaacttacagggctttcccaagcagtgtaggaaatgtggtggtacctggggagccctgagagcctggcgccccaggtgtagcctcggaagaagagcacagacagagcctgtccctccccctggcagcctctgggaggcagccccagccagcttgcagaggtttctcttgctgacctcacccaagaggtcacaggacacataatcagggcccacagccaaacgtacaacttttcttgcctgaggacgcccccacactccctgcagggcatctgaccctcatctcttcagcagatgctcactgaatgccaggtgcggcacagggcacagaagcagagttgacagtgggaccaacccctctcaagggcggggatctgcaggaaagaacctcagtcaagttggggacaggctggggggtgaaggaatggggacagatgaagagggaccaggtcgggcagctgctgccagaagatgggagcaggggacctgcactgaggctggagcagaggcggggagggagggagtgaggctgagctgtgagcagcaggaggtgagaagcctggaggcgccgggctgcagagcaggggcatcttggggcagggtggaagcagggcgtcaggctgtcctaacaatccctgtgcagggatgctgggcgcaggcttggtgaaagcgataagagtctagacttattctgaagggaggtgggaggggctgaggagaggaacagaagggcctgggaagaagaggttccatctgacctgggagttgggttgtgggagttgggatcttggtctgggcatgttaacacatctgccagccaaggggcgatttgttccaagtagcagttggccatgtgaggcccgagttcagaggagagtctggctggagaggtagatgtggagccatcagtacagagacagtccttaaggccactggcctggacatggtcaccagggtgtacaggttggatagcagtgggagaggcggagctggtcaggcagggctgccaggggcaggatgctgtcccttttatgcagtgagcagtgctttgtgaccccacctccagaacgcagtaaaaaaggcaggatgccttctagtgccgcctttggcagatgtggactgaggaactgtctattccagcactgggaggggccggctggtggagctgtgggtccctgaggaaatggccaagggccagggcagtccctgggcagatgctgcaggcctgggggctccagagcccatccgagtgccagatgtccagctgtagcctggccccctccattcctgggccctcaggtggctatgtacacagaagtgagtggccttgggctagtgcccacattctcctgagggacagaatccctgatccaccaacccctggaaatgccatgcagagcccccagagagccagacagccctgggcagccagccagctccccccataaaagccccaggccaggccccggacactggtgtcctgggtcaccgttagctccaggaataagtaccctagaacccctcgagaggctggacactggatagccacagtgaggaggggtggtgggcagagggccagtggcaggcacagctgccctagccaggacccccaaggcccatgtgcctccttccaaggtgccccaagcctgctcgccttccctgcccccagccttagttttggtaatctgcaaaaccaagggccctgccctgggtgctgctctcccagtgcaaagtccctaactttggtgtgacccttaccagagtcaaggctgtctgggcctggctccttgtgacatccatcgccatctctccgaggggctaagaggtagatgctttgggaggcagagatgctcctgcctgctgaggcctagcacatgctgtagccttggagcgtaaggcccgcctgtggcagcaacggctgcttggatggagagctgcctgaggctggcagcccagggcttctgcactgaaagggctcagcctggcggctgctcaaatactctgccccctgccatggggtcagaggcagggcagaaagggagggtaggccatgtgggtaacagttgacagggccacggggacagagccatggggcagccggccacactctgtgaacatggggtagggattgctgcccagcaggagggggtgtgcagagccagcctacccatcttccattcctcagccttgtgcgggcagaaagtcaccaggctgccttggccacagaacacttactgaaatgcccttggacagggagggggtcctaagggggcctggcccgcgctggtgcaggtctggacttgctcttggaggcaaggggatccccagtggattttcatctgcagagaggttcgatttgcatttcatacaatccaggggtctgtatggaacttggggaaggggtggtggaggaaggtggccaactgatcaaaaacaaacaaaaaacaggggtatcattcttaattttgtgactgcaaagtccaggcctcaggcttgctttgggtgcctccatgggcatagaccatgacttccaggctctggcccaggcctctccttgggctcacctgggagtgacatccacatgctatgtacttgctggcacctgccaaagcctgctaaaattagctggagctggcaagtgggtcagggtatggagggtgccttgtcagaatgccaggtctctcgccaatggccagagtgatcactcccaagaaagcccttgatacaattgatccctttcccaatatagagcagagatggcctcatcagatctcatgtgacaggccactgacccccacagcccccagctctgagctactgtttgctcatgggggcagggctcacacccaggtttggagtggcactggggccttctggttcagccaggccaagaagcagccacccagcgagacttgcccttcttctgggccaagcacacagcacaggggaggagaatctaaattcagttctcaagaaaggctgaggatgtgtacaaagcctgaagctgaggcaagtgggccccctttcttggttgactgaactgccagtgccctctctagcctctatttagagcaacaggcatcccctagagttcctttctgggagccacctgctgatattcattggcatccatgaggccagaaagcggcccaacacccctacttccccacaccgtctaattctccgggaccagattctcatgactcatgccagccctcctgggcacccacccttgtcctgtctcagtgcctcttcttcaggataaggggtgacaccaacagtctgtactgcactggagttgagagtcattgtagcaggaacagttcctgctttccaggaattttggaagggcaagactgtccagaacctgtccagagaagaggggccaagaaggggagggcctcagagatgatggctcatggaggatgaccaggacatgcttagagtcttcagtagctcaagggctgtcccgaggaggatggatgaacattgtttctgcttagagctttctaaaaagacagaactgtgcagctgtgggctaggatgtctcagtagatagtgaactccccatttcatggggagagaaagacaagagcagaatcagaagggaccttgctctatgtcccagtggtacccccatttcttagttgctcagggttctgattgacagacatgacttgattttctttttcattcatcaaaagaaaataatatgacaagtttggtgatggatattcaagatgattaattctactatcaaaaaacgagacacaacccacatacccaactacaggaggttggttaaataaattatgctacacttacatgtagtcattaaaaatggtaagattcatctgctctattggcatggaaagatgttcatgacatactgttgaaagggaatgtgtagccgcccttgaagctggccttcaattagccctgcttctggtattcaccccatggtatagtctcttccatgcagaataggtctagcctgtgtaactaatatgataatgcagaaatggtggagtatgactttggagcctaagccagaaaagaccctgtggtttctgccttgttctctcctggactgttccctctgggggaagccaactgctatgctatgaggttgcctacaagaactctgggaagatccattgagaagaagcgaagtctcttgccaatacgcaactccaacttgccagccatgtgagtggaccactttggaagcagctcctctggccccagtcaagccttcaggtgatgcagccccagccaaaaccctgacctcaggagagacaccaagccagaccacccagctaagctgcttctgaattcttgacctacagaaactgtgtgagataacaaaggtttgttgtttcaagctactatggttttttttaaaaacactttatgaaataaaattttgttattacagaacaaataagtttagaaaccattttctatcttttagcatatgatccagatataagacagtgtcataccacattcttgtcatcataatacacggaaaggtgaagccactaagttttgaggcagtttgttatacagcaatagatgactaacacaggggaagaacaggaaacatagtatgatccatttttgtcgtatatacgatatagataatatatgtattgggaggaaatataccaaaatggtgacagtaattatcttgatgatggtggtatgaggattttaatttattttcctttttgcttatctgtatttcctaccttttctgcagtaaatgggtattaatggagtaatatttaacaatgaagttaaaaaaagaaaggttgagccttatctgccattttgcacagaagcaagcctggaggcccagattctaaagggtagaggttcacagttaaatgagccaagctgctagaccccatatgccattgggaaagatattgggagccaggaaaccagggaacccaaagtgtccgcccttccaccactggcctgttccctgataccctcagtaccagctgggcaccaagtgtgggcacgctgatgcaacagggcctggaggtcagcatgatgttgcaagtgtttgcttacagcagggtagacttgagaccggctgtgctcttgtgctaaggggcaggctaagggcctggtgagtgggagggtgttaggcagtggctgatggccaggacatcagggaaagaggcaaggggagagccgagagacagcagagcatgccaggatcaaatgaccacaactagtgtgtgccctgtggcttccacatgccaggggatgtgctagaccctttagatggattgaaactggccgatgagctgaaggctgtcattttatatgcagggaaactgaagcctatgggagttaagggatttactaggatgcaacagctatgagtgacttggctaagattcacccatgggtcactctgactccaggattgttaacagtttggtcttcttgactagatggggagggcttcagggtcaagcatatgctgggggacaggaaatatcctttggggcttcttccatgctggagatgttcagaggcttcagctgaagctggtggaggtggacacagtggtatccacagaggtcagttttgccccagtgtttgcctctgtcaacagatggaatggagcctggggctgggtgtcagggataaagcctaaggccagcactgttggggttgaagagcagagcatgagtaagggtgcagggagcagccctgtgcattgcctagggaggggttaggagaatcatccaagactctgtgctgagaggcaggataacactggggtaacacagaactgtaggatctccagcctgagtctggagactggctttgccactcactggctctagggcctcgggcaaattccttaatgtttctaggcctcagtaaggggcaggcaacaattctactacctcacagggctgttgagaggattcaatgggataatgcaggtaaggctcttggcacatacaagttgttcaatagtttgtagctgttgttgctaccaaaggatattttagcccttgggtcagagtttaagacatgggctgtccccagctcttgatttacggcagatctaatgccaaactcctaccccaatgcatactgattatttctgtgttttaaggagacagactaggtggcatagactctttgatgctagtcctacagtaaatcaatgaagctttttgtctgaaaagagttactagggaatgatcctcatgaagctggcaacgtaggaaacttcaggaattggttcctctatctaaacaaccagcaagttagaaaagaaaaaaatcctgtaagagtcaactctttcagaattctggaacctgattggacacttacagcaaccatgggagtgctcgatgaagggagaggcatgctgatggctcataagtgagtggtgtgggcaaaccagctaccatcctgcattcttcaacattcctgtggccatgtggacagtaattgtgttcctagagcagctggctggagcaggagtgggcagaaaggaccttgtcttccagaaatttggagaatcaaatttcttttgtttatctggtggttccctgagggctcagagtagagcttgcctttgtttctgccccttcaggcagcagcagccttccaggtggcatctatcagaagatttttaaaaaggtacatacatgctaggttttttgtttcttgggttttaaaaaaatctatgcatttaaggaatgctcttccaggtcataggctgactgcagaggcaccagaacagaaacgtcagtgaccagacacaagagagaatacatactttgcaaaaatcgtttggaaaagtcactatacaaatggacaactgcagccctcaacaaacaacaaaaccaatctcaaaggagggggagaatctggcttcagaattaccacattttactactcaaaatgttaagttttcaacaaagtattacaaagcaaataaagaggaagatatgactctctaacaggacaaaaataatttaaaagaagctatccataaggaattttagacattggaattactagtcaaagacattaagtcaactgtcttaaatatgcttaattaactaaagaaaaccatggacaaagaactacaggaaattgggagagcaatgtatgaacagatggggaatgacaataaaaagaatttattaaagaggaaccaaatagaaattctggatctgaaaagtacaatactgaaatgaaaaagtcactggaggggttaaatggccaatttgagcaggcagaagaaataatcattgaacttgaagaaaaggcgattgaagttatccagtctgcagagcagaaaaaaagaaagaagaaaaatgaacagaacctgagggaccagtaggataccatcagtcatgccaactaagtatacgggagctccagaagaagagagatggaaaggggaagaaaaagatatttgagaaatggtgaaataatttcccagatttggtgaaagacaaacgtacacatccaagaagctcaatgaaatccaagtgggataaactctaagaaattcacactgaaacacattatagtcaaattgtcaaaagacaaagacagagagagaatcttggaagcagcaagagagaaatgacacatagcatacataccaaggatttgcaataagtttaacagatgatttctcattagaaaccaaggaggccaaatggcagctgtaataataattacactttagaccaggcatggtggctcatgcctctaatcccagcactttgggaggccaaggtgggtgtatcacttgaggtcaggagttcaagatcagcctgaccaacatggtgaaaccccgtctctactaaaaatacaaaaattagctgggcatggtggcgggcacctgtaatcccagctaactcgggaggctgaggcaggagaattgcttgaacctgggaggcggaggttgcagtgagcagagattgcgccactgcactccagcctgagtgacagagggagactccatctcaaaataataataataataataataacactttaataataattgaagtgctgggaaaaaaactattaactaagaatcttatagccagcaaaactattcttcaagaataaaaaagaaattagacatttcagataaagaaaaccaaagggaattaattaccggcaggcctgccctataggaaatgctaaagggaaacattgaggctaaaatgaaaagacactaagtagtaattcaaagacatctgaagacataaaaatacactgttaaatgtcactatataggtaaatataacagcaaatattaatgtagtttttctttgtgattcttgttttcctgtatgatttaaaaggcaaatgcagaaaataataataagtttatgttagtgaggatataatgtataaaaacataatttgtgggaataacaatataaaggaagaaggatggagatatataggagtagagtgttcatgtactattggaactattattcaaactagcttcttataagtgtaagatgttaattgccatcctcaaggcaatcattaggaaaataactaaaaaatatgagaaaaggaaagtgacacaggattttttccttggtcactttgcaagccagggaccttggtgatgccctgcccaggcctcacttggccatgctacctgctgtgggagatggcccactaacccgtgctgcccagaccaagtctggcttgtgcactggttcccgagttcttgtaccacacccaagaaaaatgaggatacgctgacaatcaaagagggagcaaggtgagagtttcattgagtgatgaaaacagctttcagcagagaagggatacagaggtggtccccctacctgaagttggcaaagtgcccccaatgtggctgattccagggcttttatgggctcagaatgggggaggggcaggccataggtagtattggaaaaggcaacattcgattggttaaaagggattatttagagggcaggcaaacaggaatggaagttctcactctggatcatgggtttcatctgggaccagcagtccggtctttcagccttcaggctattttttggcttgaaggtggggtttcatgggggacaagcttctatctgccaggcatttggctgcctcctgccgctatcaaaaggagaaaataatcaaaatgtaacaacacagacacaaaatcaagaagtaaaaaaaaaaatccagtaatggaggaattgagaaacttaaaaatgtataagacacacagaaaaaaaatagctgagtggtagaagtaagtccttcctaatcagtaattattttatatataaatagattaaactccagttaaaaggcagatattggcagagtgaataaagagaacattatccacctatatgctatctacaagaggctcactttagatataaagatagaagaattttaaagtagaaggatggaagaagatattctatgaaaataacaaccaatatgagagttgtggtggctgtattatcagcccaaatagattttaagttaaaaaaaaaagtctcaagagacaaagaacattatatgttgataaaagttttcatccattaagaagatataaaaattataaagaacagaacaccaaaatacatgaaacaaaattttgcaacattgaagggagaaatagagttctacaatagtagttggagactttagtacactactttgttttttgtttttgtttttgttgtttctcgagacagagtcttgctctgttgcccaggctgcagtgcaatggtgcgatctcagctcactgcaacttctgcctcctgggttcaagtgattctcctgccttggcctcctgagtagctgggattacaggcgtgtgccaccatgtccagcaaattttttgtattttcagtagagacggagtttcaccatgttggccaggctggtctcaacctcctgacattgtgatccaccctcctcggcctcccaaagtgctgggattacaggtgtgagccaccgtgcccggccactactttgaataatggattaaacaactagacagaagatcaataaggaaagagaggactagaacaatactctaaaccaattagacctaacagacatatacagaacactctgtccaacaacagcagaatgtgcatttttctcaaatgtgcatggaaattctcaaggatattttagtcacaaaacaagtcttagtaaatgtaaaaaaattgaaatcatataaagtatctttttggatcacatgaaataaaactagaagagaataacagagggaaaactggaaaactcacagatatataaaatttaatcaagacacttttaaatgactctcaattgcagggagggggagagaaagaactcagattattaaaatcaggaatgaaaaaatgaaagagtgaacgttattactgactttagagaaaaaaaggactatgagagaatactatgaacaatttagtattgtttgttggcttacccaagttagataaaatggaactttaacttaggtaaacttggataacttagatgaaatagaaaaattccacacatgagctactacaactagctcaagaagaaacagaaaatctcattagactaataacaagtaaggaaatggaattagtactaaaaaacctcccaacaaagaaaatcccaggaccagatgtctacactggtaattctaccaaccatttaaagaagaattaacaccaattctctcaaattcttccaaaaaataaaagaggaagtaacacttcctgattgatctcatgaggccagcattgccttgatactgaaaccagacaaagatactacaagaagaaaaactacagagtaatatttcttgtgaatatagatgcaaaatcctcaacaaaataccagcaaataaaattcttcagtattaaaaaatttgtttttagtgatgaggtcttactttgttgctcaggctggagtgcagtggtgcaatcatggctcactgcagcctcaacctcctgggctcaaacaatcctcctgcctcagcctcctgagtagctaggactaaaggtgcacaaccaccacatcaagctaattttctttcttttcttttctttctttctttcttttcttttttttttttttgagacggagatttgctcttgttgcccaggctggagtgcaatggcatgatcttggctcgctgcaacctccgtctcccaggttcaagtgattttcctgcctcagcctcctgagtagctgggattacaggcatgtgccaccacgcctggctaattctgtattttcagtagagacggggtttttctatgttggtcaggctggtctagaactcccgacctcaggtgatctgcctgcctcggccacccaaagtgctgggattacaggcgtgagccaccatgcccagcggtaattttcaattttttgtagagatgggatcttgtttacttgcccaggctcttctaaaactcctgatttcaggtgatcctcccacaccagcctcccaaagtgttggaattacaggcatgagccatggcacttagcctcttcagcatatcttcaggttatggttatggattatacaccataaccaagtgaaatttatcccaggaacacaagaatagttcaacatgcaaaaattaatgtaatgtactacaataatggaataaaacaaagaaactacatggtcatattgattgatgcagaaaaagcatctgacaaaactcaacaccctgtcatcattgaaacaagaagaaaatttcctcaacatgataaatgtcatatatgaaaaccccatagctaacgtcatatttaatggcaaaagacttaaactttcttcctaagagaggagcaagacaagaatacccacttttgccacttcttttcaacatagtagtggagcaattagggaagacatttctaaccaaagcaattagggaagaaaaataaataaaaggtatccatactggaaagtgctatggaaagaatgtgtcccctcaaaattcatatattaaatctgctgtgtgatgatattaagaggtggggccttagaaggtgctaggtcatgagggtagagcccacataaaaagaaaaagagcccttataaaaagaataccggaggacaggcacggtggctcatgcctgtaatcccagcactttgggaggccaaggtgggcagatcacgaggtcaagagatcgagaccatcctggccaacatggtgaaaccctgtctctactaaaaatacaaaaagtagctggacatggtgatgggtacctgtaatcccagctactcaggaggctgaggcaggagaatcgtttgaaccagggagtcagaggttgcaatgagccgagattgtgccactgcactccagcctggtgacagagtgagactctgtctcaaaaaatcaaacaaaaacaacaaaacaaacaaacaaacaaaaaggaatcccagagagctaccttgccttttccaccatgtgaggacacagctagaaggtgccatgtatgaaccagaaagcaggccttcatcagacagtgaattagcttgggccttgatcttggacttctcagcctccaatttatggcattttgttacagcagcccaaatggactaagatagaaagaaggaaatagaactatctttatttcagatgacatgatcttatgtagataaccataaataatctcccaaaatatttgagctaatatctgagatcaaattgagctaataagctaattcagcaaagttgcagcacacaaatatcaacacacaaaaatcagggtttttttataccttagcaacaaataacccaaacaggaaattaagaaacaattacgtgaaattagggaacacttcacaccgtcatttaggaatccaggcttctactttatggctccacccactccctaaagcctcatcattatctgcagctagcctacggaaaggtgagaaagaacatgaagaagccaccctcttcttaggagcctacacctggaaatggaaatggtatatgttgctccactgaaattgcatggagacatctcactgcgagggaggctgagaactacagaacagctggccagctgttgctggcattgtcctcactgtggacaaagaggacatgggtttgggtctagagctagcaacctctgctatgttccctggattcctaaatgactgtgtggaggagaacctcccagctgatgaagaactgcacttgactattatatgggcaagaaatacaattctactatgtaactgtatttcacgttttgctgtattggttactgcagtgaagtgttccctagtaactactcagaatgatggtatcaatgaccaaaaatatgttggaaggggataccggatcactcattattcaatgtttcttgagaacctaatttgtgctcagtctgaagttagaaaagtgattagtttttagtttccaaggagcttaccatctagcagaagagacaaatgaacagctcaatacaaccagataccagcaaagctatgtctttggggacataaggagactgataggtttcgttttgttttgttttctgaaggcaaaagagcaggatttctttgatgcactagggggaactggccaagaagggaaggatattccagatagagaaaccagcaggacagtgtcaggggtgtttagagaaacacaaatatttgagtggctcatacttaaggcacaccaagggaacacctagcaaatgaggcgaggcagacgagaaataaacaacagaggggaaaccaaaatattctgtctgctcagaaagagaaaagtgctgctgtaaatggcatttgggccaaaggggaaatctgcattgcattacagaccatttataaatgaataaccatgaatgtacaaaatattaaaagtatggctaatagccaaagctgtctcagaggaacatttatgcccatgaaggcacttactataaagtaaataggggctgggcatggtggctcactcctgtaatcccagtactttgggaagctgaggcaggaggatcacttgaaccaaggagtttgaaaccagcctgggcaacatagtgagaccccatctctacaaaaataaataaataaataaataaataaaatattagccagctgtggtggcgtgtgcctgaggtcccagctactcaggaggctgaggtgggagaattgcttgagcccaggaggtcaaggctgcagtgagccatgattgcaccactgcacttcagcctgggctgtcgagtgagaccctgtctcaaaaaaataaacacaataaaataaatgggcaatcaatgagcaagatttggtaatctgatcaaatataacagagaagacactaataaacaactataggaaatggatgattttcaaaatataatataaattatcaaaatgactcaggaggacagaaaaacctgcacagatggataacaatagaagaaaagttaacagatgtggaaaaatcttcctctaacaagagtgtcaagtccagctaggttgttttttgttttttttttttttgagatggagttttgctgtgttgcccaggctggagtgcagtggcgctatattggctcactacaacctctgcctcccaggttcaagcgattctcctgcttcagcctcccaagtagctgggattacaggtgcatgccaccacgcccagctaattttcgtattttttgtacagatggggtttcaccatgttggccaggctggccttgaactcctgacctcatgatccacctgtctctgcctcccaagtgctgggattagagatgtgagccaccgcgcccggccaacagctagtttttaaaaaacaaatatggatacagaaatgtccaatgcaaggccccagccaaggaagaggcagagtcatcacttattgaatgaggcggtgacaggcaagacctgtgggctgttagggaatgtatgcgagggacacagagctgggacactgagtcctgcattcatgtttatgacaacacagaaacaatgggttggaagaataacatcataatagctcatgtatactttgtgccaggtgctgtcctaagctcttctatggattaatttattggatcctcacaacagagctatggagagataaagtaagtttcccttgtgactcttgctaatacaaggtccaaaccctggcactctgtcttcagggcccaccctgtgtcactgagccatcctgcctctggctagctggagggagggagagacaggctgagatgtcattgcaggagccacagtgatgggtgaggggtactgctgggcagtaggtagtgggaggagagggctgcagacccagctcacagacacaaaaagggatgcaggcccagggtgcttgttaggaccagggtagaaccagtctcacctcttagcagacacacacatgaataaacatccagaacatataaagaattcttccaactcaataagacggtgacaacaacccaatttttaaaaactcaccaaaaatgcccactaagcatacagaaatatctgcaacattattattagtcaatcatagaaatgcaaattacaaccacactgacatatcactacacagtcaccagagtggctaatatttaaaagatgggtgaaaccaagtgtcgggaggaggatgtggagcaattggaattctcaaacactgctgatggaaatgcaacatggtacaggccacattggaaaacagtttgacagtttttctaagtttaaacgtacgcttaaccacacgatactactcctaggtatttatcccgccaattgaaaacccctgtctacacaaagacttgtacttgaacattcacagcagcttcactcatcatagccaaagcctggaaacaatccaaatgcccattagctggtgaatgaataaatggatgaacacaccgtagcacagccatacagtggaatactcactgctcagcaatggcaagggagggaggattgacacactgctgagctaggcattatgttaagtgaaagaagccagacacagaagactatattctcagtggtctcatgtatagaacattctagaaaaggcaaaaccaaggggacagaaaacagatgaatgatttccagtggctagggtgggagaagtgattgacagcaagaggtggggctgagggaattatttgagtgatgggaagattctgccttaatggtgatggtggttatataaccatatacatttgataaaactcatcaaactgtacacttaaaaagtgaatgttactgtatgtatattatatgttaatttttttaaatggaatctccgtttgttatccaggctggagtgcagtggtgtgatcttggctcgctgcaacctctgcctcccgggttcaagtgattctcatgcctcagcctcccgagtagctgggattataggcacctgccaccattcccggcaggtgccagtgaagccattgttccagctcactcagtgggacttgggacaggaaacaggagatctggggagctggtgggacgcttactagctacctgaccttggatgaatgattcgttcctccagagcttctgtttcttcacctatgaaaagggagaagatgccacctcattctaaggagctgcatggggactaaaggaaaaatcttgacactcaaacgcaattttctgttgttacagggccaaggagctctgggcctgagaggggaagagtctggtcagcattgcccagtattatagctggatgtttgcccaccggaacctcatgttgaaatttgatcctcaatgttggaggtggggggcctaatgggagatgtttgggtcatgggggcagatacttcatgaatagattaatgcccttccttgggggcagggtgtgagttatttcttactctattagttctcaagacagcttactattaggaagaggctggcacctccctgccccctcgtgcttcctctctcaccatgtgatatctgcacatgcaggctctgcttcaccttctgccatgagtggaagcagactgaggccctcatcagaagtaggcattggtgccatgcttcttgtagagcctgcagaactctcagccaaataaacctcttttctctgtaaattatccagcctcaggtatgcctttacagcaacacaaatggactaagacaccaggaccccctgaaaatcagcaaggtcattggcaaaagcaaggctatccagcacaagcctctgcttctccttctttcttctttgttcttccttctccctctccctctccttccctttccttccctttttccttccttccttccttccctccttcccttttctttctttctctttctttcttttctttctttttcttctgcttctgcttcctcctcctcatcttcctcctcctcctcttcctcctcttcctcttcttcttcttcctctccttcttcttcttctccttcttcttcttattcttcttcttgttctccttgttcttcttcttgttcttcttgttcttcttcttgttcttgttcctcttcctcttcttcttcttcttcttcttcttcttcttcttcttcttcttcttcttcttcttcttcttcttcttcctactttcttctttcttctttttcgagacaggtcttgctctgtcacccaagctggagtgcagtggtgtgaacatgactcactgcagtctcaacctcctgggctcaagagatgctcctgcctcagccttccaagtaggtgggactacaggtgtgcaccaccacacctggccaattaaaaaatatttttgtagagccagggtcttgctatgttttccaagctggtcttcaactcctaggctcaagcagtcctcccacttcagcctcctaaagagctgggattacaggcatgagctatcagacctaactgcttccccttcttcttcaggtctcagcccaaaggtcacttggagagcatcactgtattaggctgttcttgtgctgttataaagaaatacccaagactggataaattacaaagaaaagaggtttaattggcttacagttttgcagacagaacaagaagcatggcgttagcatttgcttcttgtgaagtccctggaatcttaaaatcatggcagaaggagaagggggagcaggtgtctcatgcaagagtgggagcaggagaatgagagggggccaggctctttcaaacaaccagctctcacgtgaactcactcatcaccaaggggatggcactaaaccattcatgagggatctgcccccatgacccagacacctccttccaggccccacctccaacataaggaattacatttcaacatgagatttggagaggacaaatatccaaagtatatcagtcactatcggaaaacacttcatgttctatttgtttattgttaattgtctttgccctctaagaggcaatgcccaggagaacaggaacccagtctatctcattcaggtctccaagacccagggcctggcccatcgtgggctctcactgctcagcagctgctctatgacctgcagaccaatgcggccttgagctgttccccaagaccaggctctggtctcactttcccagcatcttgtgactcagcactggcaaggtctctgggctagcccctgggctgcaataggagcaaaaatggggcagttgtccatgcgtgctcctaggggtgggatggatacattcttgccctctaacatccagttccccttccttcttgctcatggaacctctgttttattcaggggtcaagtagtaatggacccagcactgggggctgaataccctggacaaattcaccctgctgtcttctgctagagctggcttcagtacagtgagatgtgagaaggaaggcctctggggagatatggtggggatccccttcccttcttgtttccagaacatttttgggtttgtttgtacctcctgtgcctgtggcggcatctggcagatgtggggaaggttaagagaatctggaaagctgacccagagcctgacaccaggctgagagctgcctgcctctggactctttcttatgtgctttgacaatacctgttggtgaatccagttttagttgggtatctgatacagcctagacaaccctaacagacacggtgggcttaacaggtcgttctgttcagctccacgtgagaggtgctccaaagagatggaaacgaggcgtagtgggcacaaaatgtagttaccgtttacagggtggggtttggaaaagcaggtgaggcagcagctggggaggtggagctcccagccaggtgaccaaaatccagtgctgtgctggagaagggttagcaactggctgtcctgggaagcagacctgactggcagcatttgctgccttctgtgttgtcggcacttcacctgatgtcactcaagggggagttgagcagaggccgtgccagtgcccctcctgaactgcagcttggagccctgggtctgtcatagaatcacccgatgcttccctgctctgcctgcctccaatccaaagatttcctcaacatctgatcctcctgacccacccgggccaacttgcccacctctgagaggctgcagttctcatggggattggttgcagatgcacccactggcttgacgtggtgggctgggctgtgtctgaaaggactgagggaagcaaaccattccacccattgtctttgtccagcattaccagcccaaccagccaaactcaggccactcaggccaatgctgcccttctggatttcctgggagggtgaaccacatgcatgtcctttgcaaccacattgaaaatctattggagagctaatttactaatcgcaggatcactccctaggattacaatactctagggttttaaatgaaaaaccgtatgatgcccatctgaaaactccatctaatccccccaatatcacaaaactctccaaatatagcaatccacaaaggacttctgcataatgtaatgtatttaaaataccaagtacctaatgatataatccctgaagaactcagcagtgggtacatttgtatgtagtacgtgatgaccctgttcatttcagatgctgtaggagatgctatgggtgcctgctgggcccctgtgcctacccccagctgcccagggctgaagagaagagctggacttctttcctgggacttactcctgatctacaaagttacttcacctagaaatacctgggaagttacgcccttcccagggctggcggagaaaacacattatgttatgcacaatttgggacatatactaaaaaataatttgttgtttatctgaaattcaatttaactgagtgccctaattttttatttgctaaagctggcagccctagcctttccccaggggcctccagccagtgactgactcatgtaggagcacaaaggctggcccctgcctcagagggacaactctgtgatgtcattcacatttgagagctccctgctgggtcagactgaggctcaactgctgctgaatctgtacctttgcctatttctaccccatctcatcctgagagcaccctcccactcaatcacaggtgccagaatccttatctcaggctctgcttcaagaacctaacacagtataccaggggtggtcctagaaatcagcctatgagggcgggactctggagttggatcacttcccagctggttgccacctcactggtggtaggagtactgacagtctctggcacattgcagcagtggatcgccaaggccctgcctgtggggagcggggatgggggtagacagggaggtactttcttactcagtgtctctggcaccgagggtgtgggggagatgctaacccgaaggactatgccactgagacctgtggatcagtggagtgatgcatggaaaagagaaaatggcaggctcaggtctatcgatttaaagccaagcctgagagccagagggtcttctcggcagtgttcaaagagatgcttgtctcctgtagtgaggcaggcagagctggagaccaggcataggactcaattgtaagagcagtagcagaacttcagcaagggctgagtcctccaccaaggcaagccacggccctgatgggaaggagtatacacaatggtatgctgggaaatggccaacaatctgctgtctagagatgcgggatgccctggtttgtagcattttctgattttcatggtttaaatacacccaccatggcccatttccagctactgacatagtgtcactgaatgaagatttggaaagagatgtgtactactggttttctaatgtgctagtgagtacacttgagaattttgaattgccagattcccacgagccacctgcatctacagaagtagtcttgctgtgagaaggaggccttttctctcttgaaaagtatgcagatgtctgaaagagacaagtgccccaggagaaaatgagtgccttcctcaggatcggcccctacctcccctcctggccacaaggagggtcaaatctcagcatggcccaacttggacctgtcaaggaagaagaaaaaaattgtatgccaaaggaactcagtctttggctaacaagtactagcaggaagtgggagactagatcccaaaagtgctggatcttatgcttgcaacagtcccaaaggtgctggatcctgtgattgagaccagatcctgaaggtgctggactggggcaggtgggatatcaagaggataaggggactttgctgatgtgggggcattctcctatgatgcaggatttaacaccctagcaagggtcccaagagagggctctgatatattgctggggttgctcttggtagcttagaaaaagcaacagctcgattaaatgaagcagggatgcttgagtttacatggtgggccaagaggaagtgatcaaaaggataaaagaaatggggcaaaatataactgacctactctataagatcaaaaagcctgtaagctggctatgttccctggaaaggcagggaagacactctgcttcccaggctgtaaagaatctgctggtgtcgggcacatggctgaggctcagtagggctgtcctttgtagaccagagttgatgggagacaactctttttcagagcttctccccctaatggcagtggggatgatagatcacttaagggcagagaccaggggcagcacttagaagcatatcagaagcaaagtgggaataattatcatattgggcaccaaggtcagactaacaactagaagggattagcttataggggtctaaggagaaggctaatagagtgttggattcttaggggctagaaaggatgaacagaaggccaaggtcagtcaccccagtggaaagttatgatggaaaggcacagtttccaaacctcagccagttctcgaaccagaacccattgactgaaagagggactgggttcccatgaggaaagactctgtagcaccacagcaagtgtgtataacaggaacctatggctatttatattcgaccacactgagtaagggtaacactcagatcttttgatagtgatttcatagcaattcacacttttttttttctttttttgagatggaatctcgctctgtcacccaggctggagtgcagtggtgtgattttggctcactgcaacctccgcctcctgggttcaagcaattctccctgcctcagcctcccgagtagctgggattacaggcacccaccaccacgcccagctaatttttgtattttttagtagagatggggtttcaccgtgttggccaggctggtcttcaactcctgacctcaggtgatctacctgcctcagcctcccaaaatgctgggattacaggcgtgagccaccatgcccagccagcaattcacacttatatctagggtcccaaagtgctgtcatggctgtcctagtagagtgcaggcttattggggtaagacgacaaatatagttctggcccaggtatgtctcaaattggatccactagttctgtgtattcacccagaaatcatttccttggatcccgaataaatcattggaatggatatacttaaccatcagaagagcccttacaatggttccttgatttatagaataagcaacatttgtaataacaaaggcaaagtgaaaatgctgcattcccacccagccaaaacagaaaaacacaaatctggagggatggcagaaattattaccattctcaaagacttaaaggatgtctagtacttgttagccaaagactgagttcctttggcatacaatttttttcttcttccttgacaggtccaagttgggccatgctgagatttgaccctccttgtggccaggaggggaggtgggggccgatcctgaggaaggcatgcattttctcctggggcacttgtctctttcagacatctgcatacttttcaagagagaaaaacgtgatatgatggtcacatcatatcaacctttcattctccagtttgatctctgcaaaaactggttggatcagtcctgacccttaggctatgtgattggcaaatctgatgatactctgcatggaatgtgagattaggccccaacaggagtcactgtccaaacccctagggctccggaccaaggtcatgccatctgcagcagagaaccaaacaccacttgtaaagcatttcctggcatgccactcagcagagtgtctgaccataggacattaagtgaccatgtggccataactgcccattatgagtttggtgctgtcagacccactaggtcataagccatccatcataagatggaaatggtatatctggaatcaggcttgagcaggtccagatggcacagataagctgcagggacaggtggcccagacccacctgccatctaccactgttgcacgaatattggcccctgtgcctctctttcacccacatgcaaatatggcctcctggtggggggtgtcttttgtctagctgctggaggagggaaaaacccatctatgcattgatcatggataggttagtttggaatgttgatgcaagctggaaatggacttctgctgtacttcagccccactcaaggtggccctgaaagacactggggagaagaaatcctcttagtagagttttggagggtgcacctgcttattcactttgtgtggagagagatgtggcctaaggtaaatatagactcatggacattggtgaatagcttagctcgttcttcagtagcttggaaggagcaacattagaagattgtggaaaagtggtggcatggggaaaagttgtagagctaaacctgtgtgagtgggcacaaagtatgagacattaatgacagccagaaaccacttcttgtggaagaggcaataataaccaagtggataggatgggcaggcagctgaatgtcggccaccatgcactcagaaatagatagtcatggagtcagagaaggaagccatgcctgtgcccagaagcatacattccctctcatcaaggctgacctagttttgctgctgttgaatgtaagaactgccagcaatagcgactggtgctgaattcctggtataacactgctcctggaggagaccaaccagccactactgggtgacaagttggctaaatcgggccccttccaacctggaaagggcggcattttctcttgacttggattgacatgtattccagccatcaatggacttgcctttcctaccctcagtgcagcagcctgtcctgctaaccaaggaatcacagatagggtggtggagcatcctcttggaggcacagtggagctgtcatcttgaagatgacacccatgaggagggcccagtctcctccagaatgcaatatgcactctaatggctatgggatgaggccatgttcctgaaaggtaaaatatgtgggtttgggaaccaagaactcttcatcactctccatgatccacttgggaaatttgtgcttccgccattcacaactttaggttttgtgggtctagaagtcctggttctcagagggggtccttccaccaggtgatacattaacacattcactaaatgtacagctacaattgcctcctggtcatgctgtgcttccttgtgccagtagccaagcaggtagagaaaggtattaccatcctggcacaaggagcaaaatgtggcaatttacccttgtcattaggaggtaggactaccgctacataatggagcaggaagaatatggcttgcactcagatgatttgccagggtgtttcttggtagtctcatgtccagttgtaattgggaatggacaacttacaacaacaatagcctgataaaggaatccaggattcagatgcctcagggataagggtttggctcctgctctagggaagtcacctagaccagcagtgttagccaaggggaaggggacactagaatggatggtggggatggggcatgatggtgagtatcagtgacagtcttacaatcacatgcagaagtgggcattgtagttcatccctctgtttctccaattgtaagttttccctgaagctgtgcctggatggagagagcttaaagtggaaagcagtaggtctgagcagtcaaggggtggactgtagtgcctgctgttggcacctcactggctgactggcctgcacacccagcctttagccgcagtgagcagcagctgcagactgctcacagctacacccttctcctgagagtttcctggaaatgcctggaagatcttccctccccactggccctcagctggtggctttgatacaggtacaataggctggcccctctcccaggagggacaaccctgtgatattcttcatgcatcagagcccttgtggaaccagactgaggcggacttaagctggacctgcctttttgactggcttcttacctctcgttttctgtccccccaacttccttatagcttctgctgacagcgctcccgcaaacaccattttccaagaattccaatctcaggctctacttcttgggaacctgacctaaaacagatacaaatcatgttttcccttcctactgtgcaggctggcagcagacaaacgatgcaggcaggcagtgagactcagattgggtcctcctgtcggaacagctgggatatgatgtccatgccctctcccaggacccaggtggaacttgaatactgattcatcatactcacttttcatttggagagtgaattttgggtaaatgactttgcaatccatgaaagtgaatactcagaacgttttcaggtagcagaggatccctgtacttccaagacagagtgttcattgagatcagcctcacagccgtgccctctggatcacagcccaggagcatggaaaatcccacttcttggcctctccagcactcccctttcctacttgtttattggctgggctgatagttgctggttgtctacaacaaagatcccactgggggggctaatactcaggtattgccaggtaaggaatgctgtgaatatcactccaggtcacaagtgcttgtgttaggggactcctgggactacgaagggtttggtaagagtaatctgtgttgaatctagcctcatttcctttttctttcttttatagtttttaattttttggtaatagagaacttcgaagtaagtaaaggagatagtataataaaccctgatgtactcactgcctgatatcaataattgcaaccttaattcattccagtatatttttacatgtgtttcagactgaaataaagggagatgttcagcctcaggtgtagaagcagtgagacaatttcccaccacggaggaagatgaagagcaggagaggagaggctggcggctcccaggagcagatcacctgcccccactgcaaggcccccgtgtgctcaataaactgacccttgcgcagagactaaggctcacttattggaaactattattgttacagttactaagtaattaacaagtgatgcatagggctggtcagttatgtgactatacgtgcgcgtgtgtgcacgcacgagtgcatgtttagttcattacagaaacaccatcatttctttgtaatcagctgaaatcaccactcattagtgggcctctcgtgggctataactgattttacagccacctgtcatttcttttttctttacaactttgtgcgtttgtgtttttcatggcatgctcagggtacactatgttctgcacgcaagcagggggctgcacgggctccagctccccttctcaggcacgtccctctcgatgtaatgtgtaggatggaacttcttcccatgcgctctgtgaaggggccccgcagctccccagctggacagctgctctggagactttggcagggctgggcacctgtggagcctgaggccagacccagggagccacactgtgggaaccacagggcacctggaacataggtttaatccgggcctgtctgtgagtaatagtgtcacagtgggagggcaggaggcagggtgagtcagtggctcctggaaagggatctgtcatgactcacatggcgtttcttccctcatccttctatccttctacttgcaggactttcctacaattctgtctgtgctggttcacggttatgtagcatcaggatggggctccctctttgctcaggccagcaaaagagagacagaaagagagagagagattgagagagtgagaaaaacagatatacacacacacacacacagaaaaagaaacaaagcgaaatacagaaagatagacacagagagagagtgagaaaaacagatacacacacacacacacagagaaaaagaaacaaagcgaaatacagaaaggtagacacagagagagagagagacagagtgacagagacagagagagaatactacagacagacacacagagagacaatgagacagagagagagggggagaaagagacagaaagagagagatacagagaagttcacacagctgtgagggggctaaaggaggaagtgtccactcctgagaagggaagggaagagaaaggcagaaggaggggctgggccaggtgtcccaacacagggataggagcacacaggggacatgcctgggctgcctccaaaggcctggctcagctgaggaatgacagactccacaaggggcttcccacatcagatgggccagaatgttcccctggaggtcactaaacaggggctcaaatctctcttgccttggggtggcttcaaggcagaggccaggggcactttgtgcctctctccatctgtcccctctcctcctgggggtcttgctgtgggcaggtgcaggtgtgggcctagctgcatcagtcagaggggctcacgctggggcttctgtggcccactgatcccctggatctcactaatgatgtcccctttggcttgctcctgccctggggcttcctagacatagctactccttctgaggggtcctcatccccagaggcctgggcacaggcagcagagtgcttctcctggggacagcccccactcttgtcacctcccagcctggcccagcctcctgtcctggctacagcaggggcactggggttgtgacacggcatatgatggatggcccagccctggtcccacagatgcagccccagccctcacccccacaccagctgcctgcccacagcgtgcccattccctgaagtcagggacctgtcactgctccgctaggccttggcgctgcctgctcctcccacacgggcccctcctcccagcacacctgcttgggggccacctggagctttgcactctgcacacctgtctcagagcaggtgccatggcagtatgggggggcatctctcctgctggggcccaggacaattcctgccagggatgtgggtaagcatgatggagtgcaccttattccatcctcattccacttctgagcctgctccttcaatggggcaaaggtgtccagggcagctggagggaggaaggtcagttcctcccggcatgccctcctggtgttacagattgaattgtgtccccccagattcatatgtcaaagccctaaccccagtgtgatggtatctggagatgagacctttgggagataattaggtttagatgaggtaaggagggggagcccccatcataggattagcattcttataagaagagacaccagagagcttgttttcactctctctccacgatgtgaggacacagcaagaaggtggcggtctgcaagtcaggaagagagccctccctgcaacctgaccatgctggcatctgatcttggacgtccagcctctagaatagtgagaaatagatttctgttgtttctaagccatcagtggatggtattctcttatggcagtctaagctgaccaatacacctgaatctcatctttccaggctccttcctgaaaaaaggtcaccaaatctatcaggcaaagttaaccagatttactcatctgtccttagtgaggtgagagtgaaaatatagaccaaaaggtccccaagagggatgcccagggccctatttcaggccacccagaagtggtggcccagtaagggatgaaccttgatgccaaaggaatgagtcagcgatggtggggtaccaggcaactgcagctggtaagaaggggcttatgaggggtgggagtagtgtcagtggaatcaggcttgcccctaaggagctgacatccacatggagaagtcactgggcacaggactgaggccacaggctcctgcaaccacaggtaagatctggaaggttggtaccggcaagacggctgctctcaatcaaagaagtagaaagagggaaaccagcaacactttactttcctccaaagcaaccaaaaggagaaagaagacagttcctcctcggtgtctgcacagagacaaccacagctgacgtcttggggacaactttgaaagtggaaggagggcattgctcattgctccaaggtcaaacactggcttggggtaggggcagcacttcccagagacacaggactggactgaacctgggtgggcctggacagccagctcacttggaaaacatcagatccttaggatgaccctaaaaccaagataggttcccccaagacaaggactgagtcctctgtgcagccagaacaggcagacaggagtggccattgcagctccacgcttccctcatccaggccttggcaccctgcgatccaggcactagaagaggggtagactgggtggagaaaagtgcagaagccagtgatactcatcctgcctttgtttagaatttggtatgttgtccatcataaattttttttgcattcattttgattatttaaaatagcatatatcttgatgattgatgtttctggtgaccccttaaagtttgtgcccgaggcattgccttgctccactcttggccctgacaagaatgtcagtgacttcccaggattctggggttcacagctggccctggtcaggaccagcaacccctcacacgtggagcagataaaggatggggcatgggcagccccagagtctgagactggatgcccagcctaagaaggtggttcactcacatgccactgtgaatgcaaggggctcagggacagctctgctgtggcctttattaaagtgattccctgtgcacacatatgtgcacatgcatgtacacatgcaggtatgcacaggcacaaacatgcacacatagcacattcacacataggcacactatgctttctctccttgtttggggaaagtgccagatctccacagcccacatgtccacctctccctagctccgagccatctttctggtcatgccaaagacagccgcttccttctccccgggtggcctgaaggggccctttgggcaggatttctcatccaaattgctgccatagcaccagtgacaggcagatctgggacttggttggggcctcggccggtccagctgtctggctgcgcaccctctcacttgggttggttgttttcctcctaacatcattagctctgccagaagcacagccagcccggggtttatgctgacctggtcatttcacacagaggcgagagggaagcatgcccaaagtgactggctctgcccacttaccccttctcccccactctgcctgggcccccagctggggtgatgcaggcacattccccccagtgtttcacagcaaagtcccctgtctccagctctctccttgctcactgctgggctcagggctggctcagagcatgcctggatttctctttgtttttggaaaaagtaactgccctgcactcctcagcaggccacagcagccctcgggctccctgcgaagtgattcctggtaggaggcaaggcatctttgacttgtcaccatgtctagtgagtgttgtctcaaaatcaggtagtgggctttgtccacaagacctcatgtccctaacccccacatctagggctctaaactctccagagcccctccccagtggaggccactgcctggacctcttggcagcctgacttccgggtcgcaggaccagagtccaaagctggatgggtctgccaggcagtaggggccttcctgccccagaaggcacccctggcaagacccttctcaaagagcctgtgcataaaatcagattctgaggctcaaacaaaccatggaatgttggggacaggcaagcaaacactcccagaatgcccaatggagggcgagataccttctccttcttggcggcctccatcctggctctgtcgtccagcatctgcacagcagccagcgtggggagctgggacccctcagccttccccagtaggcttctgaagtggaaatatccaaggcttctccgccgcaggggtcacggcccgccctgggtccctgggagaatgtggttctcctcgggctggtttggggtttgaggttcagtcacagtttcctccttttcattgttctccaacgagtcggcaagcattcccttctggacccttcctcactgagcctggatgttctccaggcagggccattgctgggcgcttgggtggcgtcctcagcgctttctctcctggttgtgttgagctgtggggcttagtgtccttcagacagattcagtgggaaatgtcctctcccttctgtgacctggggacagcttttgagtaattaggctgcaggtgactgtgtctctcacatcctagcctgcttccctggggctcaggcgccgctcggcatttcctgctccagccaggtgtggagtgggggattctcctgccagggcttactgtgctcctgagagggcctgtggttgtcatggtgaccaggagtggcctcagcagggctgaccatcctgtcattagagctgccatgcataaaactgggactggtggcaaagagcctccatccccatcaccatggtgaccactcaatcgccttgtcactacagtgaccgctagcctgttaagcctttgccacctgttcagatcctggggcagtgtctcagggtctcccacactcctgttctgatgagcagaggatcccgtgagtctggaagcagaggaaagggagcaggcagcttggcgtggctcaggagcaggcccctgggaccatctcacatccctaacccccctatctagggctgtaaactctccagagaccctccacagtggaggccactgcctggacctcttggcagcctgacttccaggtcgcagggccagagtccaaagctggacaggtctgccaggcagtaggggagcccatcggagggctttggcgcggcctgccctgactatctccttgaaatctgaaccagaacagtacacctggcccacacaagcctggctgaggttgacactgtcagaacagaggcccacagggactggctcctcctctggccctgctcaggaagcttcagcctgggatgccacccactctccccttcgcagcccaagtgcccctggagaggttgccctgtgcagtggggagtcccagtgagtggatggagcagggggccagggtgctggagccaactcagctgcgggctcagtcaatagtctggaacaaaacatacttctgcctaagtcactgaggtctggtgtgtttttcccactcgtggcccttctcagtcaggatcggccacttttcaagtgtccagcgtgactggtggctaccatattgggtagtgtcggtatagaccaaagagggctcaggacccagctccaggccacctacgctcagaggtccagcagagggggtgaggaggagtggccagtgcgatctctccagacagatgtgctgtaacactttaaaatcaacttcctattgacggtcattgaggcagtttcagattttcactattacgaagcaggctgtggcagaagtccttgaatttcaccggagtctaagtgtgtgtcagtgtttcttctggatggctcctggaggctgaattgctagttcaaatgctgtacacattttacatcttggtaggcaggaccacgtggcctcttcacatggcttcaccagtttcttctgccaacacgagaagtttggctttatcttggccaatccttcagatgataaatctttatgagttttttgccgatctgtcacctcattgttgcttgaattgcaaaatgctggacaccttttcatgtgtttcttggtgattgcatttcttcttctaaggatgatttgtttacattacttaactatgttgctattggattatcttctgcctatgga

SEQ ID NO: 223 - DNA, 72454 bp, Homo sapiens
  source 1..72454: mol_type = genomic DNA
ttaaaatagcaaaaattgaccaaaactacatttttgtgagatttcctaaggttctgtgttgttgttgttttgtttgttttagacaggacctcactctgccactcaggctggagttcagtggcacaatcacagctcactgcagcctagatctcctgagatcaagcaattctctcacctctgcctccgaagtagctgagggactacaggtgcacaccaccacacctggctaatatatatttttttatttttagcagagatgaggtctcattatgttgcccaggcttgtcttgaactcctgaactcaagcaatcctcaatttttgatacatagctttgctaggtgtaggattcttagttgacagtttttttttctgtgaacaccagctaaagaaagtttaaaaagaagaaatagagaaacttcaagtaaggcaattaaatgaacaaattaagagctaagaaacaacaagatggggtattgaggttgtagttatggcagctaatgatagaatggatccaggcagagagttcaggcagaactgtatttgcagagagtagaagtctgagggtgaaggtgtcctaaatgaggccaatttggaagactttattttattatagaatcaaagacaacgcacgggaacacaccatgccaaacccaaacaggctaagctggtgctctgtgcaaaggtatataggtttacgggaagaaaagctaccattataacatcaagtttttttttttttttaaattaaaagaatcacaaatgtggcagttctagtcagggttaaggttaaagttaaagttatatttcaggtttggttggtggatgtcacaaagcaaaaagtttgttgccaagaagtgggtgttctagtttgtgaaataaaacatcccaatgacaggcacagtagagaagaaaaagggatgggatggcaaacacaagttcctggaaatttatattaaaataaggtttataaaggaggacagtgtgcatctcagtcatcagtgctgcctgcaatggaggtgtttatttctgcccaagataaatacaccaggcctactatgtgagaggtgaaaaggagcctacattatgcttcccacgccagatgccttgacttggggttctgttcccagggaaaaagagcacatctttgaagtagttttggagcaggaggtatcttccaaattccaacgaagtatcttatatttctaggtgaccctgagaccactggagaagaaataaatgaaggccatgaaacttccttgaactagtgggaatccatgagaaaatctgacattatgttctcttctcttggaatagaaatattgtttgacttccgttttgctgaacaagaaacgaggccagaccacccacctgagcaaggctacctgggacaatgacctcacacatggaaaacattggagcccatctgcttccaatctgctgttttccaaaaattagggaagttgttttccctttgataccctctgtttgtaacaatcccaatgccaacactgtcctgtttctacaagagacaatgacaaatatgagcctgaaggaagatgagctgatggcattcccagcttattaccactccttgggggccttatcttacatacatggattcaattcgtagattcagctgggtgagtatctattattcagctgtgttagaagtgactgcttaagacttaggtgtgtggtgaaatgaggcaggattttctcctcataattaccatcttactatcactgagtcatagctaaaatcaggaaattattcaagaagaaatagaaatgtaatgttatgaggacataaatttagagatttgtggaaaggccttcataattttgtggcattttctttgagctggaattatacttgacatttcattataatatattagctataccagactttatgcatttatgtaaaattttatttgcttttattatactgtaagttctgggatacacgtgcagaaagtgcaggtttgttaagcatgtatacacgtgccatggtggtttgctgcacctattaacccaccatctacattaggtatttctcctaatgctatccctctcctagccccctactccctgaaggtccctggtgtgtgatgttcccctccttgtgtccatgtgttctcaacgttcacttatgagtgaaaacatgtggtgtttggttttctgttcttgtgttagtttgctgataatgatggtttccagcttcatccatgtccctgcaaaggacatgaactcatcttttttattgctgcatagtatcccatggtgtatatgtgtcacattttctttatccagtctatcactgatgggcatttgggttggttccaagtctttgctattgtgaacactgctgcaataaacatacgtgtgcatgtgtctttatagtagcatgatttataatcctttgggtatatatccagtaatgggattgctgggtcaaatggtatttctggttctagatccttgaggaattgccacactgtcttccacaatggttgaactaatttacactcccaccaacagtgtaaaagcattcctatttctccacatcctctccagcatctgttgtttcctgactttttaatgattgccattctaagtggcatgagatggtatctcattgtggttttgatttgcatttctctaatgaccagtgatgatgagctttttttcatatgtttgatggccacataaatgtcttctttttgagaagtgtctatttatatcctttgcctactttttgatgggtttctgtttttttcttgtaaatttgtttaagttctttgtagattctggatattagacctttgtcagatggattgcaaaaattttctgccattctgtaggttgcctgttcactctgatgatagtttcttttgctgtgcagaaactcttaagtttaattagatcccatttgtcaattttggctttttttggccattgcttttagtgttttagtcatgaagtctttgcccatgcctatgtcctgaatggtaccgcctggatcttcttctaaggtttttatggttttaggtcttatgtttaagtctttaatccatcttgagttaatttttgtttaaagtgtaaggaaggtgtccatttcagttttctgcatgtggctagccagttttcccagcaccatttattaagaaggaattctttccccattgcttgtttttgtcaggtttgtcaaagaacagatggtggtatgtgtatggtcttatttctgattctgttccattggtctatgtgtctgttttggtaccggtatcatgctattttggttactgtaaccttataatatagtttgaagttgggtagtgtgatacctccagctttgttctttttgcttagaaacatcttggcgatttgggctctttttttggttccatctgaattttaaaatagtttcttctaattatgtgaagaatgtcagttgtagtttaatgggaatagcattgaattcttttataaattactttgggcagtatggccatcttcacgaattaattcttcctatccatgagcatgggatgtttctccatttgtttgtgtcctttctgatttctctgagcagtggtttgtagttctccttgaagaggtccttcacatctcttctaagttgtattcctacattttttattctctttgtagcaattgtgaatgggagttcactcataatttggctctctgtttgtctattattggtgtatagaaatgcttgtgagttttgccgattgattttatatcctgagactttgctaagttgcttatcagcttaaggagattttgggctgagacgatggggttttctaaatatacaatcatgtcatctgcaaacagagacaatttgacttcctctcttcctatatgaataggctttctttctcttgcctgattatcctggccagaacttccaatactacgttgaataggagtggtgagagagggcatccttgtcttgtgctggttttcaaagaaaatgcttccagcttttgcctattcagtatgatagtggctgtgggattgtcataaatagctcttactattttgagatgcattccatcagtacctagtttattgagagttttttgcataaaggggtgttgaattttattgaaggccttttctacatctatttagataatcatgtggtttttgtcattggttttgtttatgtgattgattacgtttattgatttgtgtatgttgaaccagccttgcatctcagggatgaagctgacttgatattagtggataagctttttgatgtgctgctggatttggtttgccagtattttattgaggatttttgcttcgatgttcatcagggatattggcctgaaattttctttttttgttgtgtctctgtgaggttatggtatcaggatgatgctggcctcataaaatgagttaaggaggagtccctctttttctactgtttggaatagtttcagaaggaatggcagcagctcctccttgtacctctggtagaattcagctgtgaatccatctggtcctgggctttttttggttgacaggccattaattactgcctcaatttgagaacctgttattagtctattcagggattcagcttcttcttggtttagtcttgagaagatgtatgtgtccagaaatttaaccatttcttctagattttctggtttatttgcatagaggtgtttatactattctctgatggtagtttgtgggatttctgtgggatcagtggtgatacctcctttatcattttttattgtgtctatttgatttttctctctttccttctttattagtctggcttgtggtctatctgttttgttaatcttttcaaaaaccagctcctggagtcattgattttttgaaggatttttcgtgtctctatctcctttagttctgctctgagttatttcttgtcttctgctagcttttgaatttgtttgctgttgcttctctagttgttttaattgtgatgttagagtgtcgattttagatctttcctgctttctcctgtgggcatttagtgctataaatttccctctaaacactatcttagttgtgtcccagagattctggtacgttgtctttgttctcctcggtttcaaagaacttattacttctgccctaatttcattatttacccagtagtcattcaggagcaggttgttcagttttcatgcagttttgtggctttgagtgagtttcctaatcctgagttctaatttgattgcactgtggtctgagagactgtttgttatgatttctgttcttttgcatttgctgaggagtgttttacttccaattatgtggtcaattttagaataagtgctatgtggtcctgagaaaaatgtatattctgttgatctggggtggagagttctgtagatgtctatcaggtccgcttggtccagagctgagttcaagtcctgaatatccttgttaattttgtctcactgatctaatattgacagtgaggtgttaaagtctccccagtttattgtgtgggagtctaagtctcttattattgtgtgggagtctaagtctctttgtaggtctctaagaacttgctttatgaatctgggcgctcctatattgggtgcatatatattcaggatacttagctctccttgttgcattgatccttttaccattatgtaatgcccttgtcttttttgatctttgttggtttaaagtctgttttatcagagatcaggattgcaacctctgctttttttttgctttccatttgcttggtaaatcttcctccatccctttattttgagcttatgtgtgtctttgcacgtgagatgggtctcctgaatatagcacacagatgggtcttgactctttattcaacttgccagtctgtgtcttttaattggggcactcagctcattcatatttaaggttaatattgttatgtgtgaatttgatcctgtcattatgatgctagctggttattttgccagctactagctgagcagtttctttatagtgtcaacggactttacaatttcatatgcttttgcagaggctggtactggtttttcctttccatgcttcaggagctcttataaggcagccctggtggtgacaaaacctctcagcatttgcttgtctgcaaaggattttatttctccttcacttatgaagctctctttggctggatatgaaattctgggttgaaaactcatttctttaagaatgttgaatattggcccccactctcttctgacttgtagggtttctgcagagaggtccgctgttagtctgatgggcttccctttgttggtaacccgacctttctctctgactgcccttaacattttttcctcatttcaaccttgatgaatgggacgactgtgtgtcttggggttgctcttctcgcggagtatcttaacggtgttctctgtatttcctgaatttgaatgttggcctgccttgctaggttggggaaattctcctggataatattctgaagagtgtttttcaacttggttccattctccctgtcactttcaggtataccaatcaaatgtaggtttggtctttttacgtagtcccatatttcttggaggctttgttcatttattttcattcttttttctataatctttgtcttcacgctttatttcattatgccgatcttcaatctctgataccctttcttctgcttgatcaattcggctactgatacttgtgtatgcttcaagaagttctcgtgatgtgtttttcagctccatcaggtcatttatgttcttctctaaactggttattctagttagcaattcctctaaccttttttcaaggttcttagcttccttgcattgggttagaacatgctcctttagctcagaggagtttgttattgcccaccttctgaagcctacttctgtcaatttgtcaaactcattctctgtccagttttgttcccttgctggtgaggtgttgtgatcctttggaggagaagaggcgttctggtttttggaattttcaggctttttgcactggtttttcctcatctttgtggatttacctacctttggtctttgatgttggtgaccttcagatggggtttctgtgtggcatccttcttgttgatgttgacgctattcctttctgcttgttagttttccttctaacagtcaggctcctctattgcagatctgctggagtttgctgggggtccgctcgagatcctgtttgcctggttatcaccagcagaggctgcagaacagcaaagattgctgcctgttcgttcctctggaagcgtcgtcccagagaagcacccaccagatgcagctggggctctcctgtatgaggtgtctgtcaaaccctgctgggaggtgtctcccagtcaggaggcacaggggtcaaggacccacttgaggaggcagtctgtcccttagcagagcttgagcgctgtgttgggagatccattgctctctttggagctggcaggcagaaatgtttgtctgctgaagctgtgcccatagccgccccttcccccaggtgctctgtcccagggagaagggagttttatctataagctcctgactggggctgttgcctttctttcagagatgccctgcccagagaggagcaatctagagaggcagtctggctacagcggctttgctgagctgtggtggactcagaccagttcaaatttcccggtggctttgttaacacagtgagaggaaagccacctactcaagcctcagtaatggcggacacccctccccaccaagcctgagtgacccaggtcaccttcagactgctgtactggcagtgagaatttcaagccagtggatcttagcttgctgggttccatgggagtcagatccactgagctagaccacttggcttcctggcttcagccccctttccagggcagcggatagttctgtcttgctggcattccaggcgccacttgtgtatggaaaaagactcctgcagctagctcagtgtctgcccaaacggccatccagttttgtgcctgaaacccagggcactggtggcataggcacctgagggaatctcctggtctgcaggttgcagagatggtgggaaaatcatagtatctggggctgcagtgcaccattcctcagggcacagtctcttgtggcttcccttggctaggggagggatttcttccctgaccctttgcgcttcctgggtgaggcaatgctccaccctctttctgctcaccctctgtgggctgcacccactttctaaccagtcccagtgagatgagctgggtacctcagttggaaatgcagaaatcaccaggcttctgcattgatgtcagtgggagctgcagaccagaactgttcctatttggccatcttgtcagccacaacccccccaccgccttttttttttaagatggagtcttgctctgtcgccaggttggagtgcagtggtgtgatcttggctcactgcaacttccacctcccaggttcaagccattctcctgcctcagcctcctgagtagctgggactacaggtatgcaccaccatgcccagctaatttttgtgtttttcgtagggatagggtttcaccatgttgccaaggatggcccggatctcttgacctcatgatctgcccaccttggcctcccaaagtgctgggattacaggcatgaaccaccactcccagcctggaaatcttcttttaagaattgtctattcgtgtctttagcccacttttttttctctcgcactgatttgagttctttgtagattttagatattagtccttttttggatgtatagattgtgaagattttctcctactctgtcagttgtctgttaactctgctatttcttttgctgtgcagaagctttttagtttacttaagtgctatctatttatctttgtttttgttccatttgcttttaggttcttggtcatgaagtctttgcctaagccagtatctagaagggtttttccaatgttatcttgtagaatctttatggcttcaggtcttagatttaagtctttgatccatcttgagtttatttttgtataaagcgagagaggaggatccagtttcattctacatgtggcttgccaattattccagcactatttgttgaacagggtgtcctttcccactttatgttttgtttgctttgtcgaagatcaattgactgtatttagctttaattacggtttctttattctgttccattggtcaatgtcccgattttttataccagtatcatgctgttttggtgactactgccttatagtatagtttgaagttgggtaacaatgcctccagatttgttctttttgcttagtcttgctttggctatgtgggctcttttttgcttccatgtaaattttaggattgttttctctagttctgggaagagtgatggtggtattttgatgggaattgcattgaacttgtagactgcttttggcagtatggtcattttcataatattaattgtacccatccatgagcatgggatgtgtttccatttgtttgtgtcaatgtcattatttttaaaatgctgccatttgaccatcatagaactagaatatgtggactatgaaccacgtgaaagctaaggagccattagacaaggcagccagataatgagttaagtaatgacagcatggaaaatgaataaaagcctttcaaatctctgacaaagtaattgaagaaaaggacttttcccctgtgtgaagtttgtggttgagacattgttgcactgcaacagtaactttaatttttaatgtgcaagaatatatttagaaatacagtttaaaatgttgtttatgaaaaaggaatggtaactaattaatatataataactctgtaccttgatgaggtccttgtaggtccaacagcttcctgtgttaatagatgtagtgtatcattctgttctcgcactgctagaaagaactacctgagacagggcaatttatgaagaaaagaggtttaattgactcacagttctgcaggctgtacgggaatcatgactaggaggcctcaggaaacttacaatcatggcagatggcgaaggggaagcaagctcctcttaccatggtggagcaggagcctggggaggtgccacacacttttaaacaaccagatcttgtgagaactcattcactatcatgagaacagcaaggaagcaatctgccctcatgatccagtcacctcccactaggcccctcctccaattcaacatgagatttgggtggggacacaaatccaacctgttatcacacagtcttttcagtaaacccagcagtgatcagactcaggaagcacatttattatactaaccacacctacacatagttagctgataagactcttatctgttggttgaggggggaggagacccagagaaggaccagaatattgtcatttagggtatgatgtttaggctgttaggtggacagcaaaaatggcagaggaaggcagggtggtacaatgagtgatagatgatgcaatgtgaatcgaaggcctaaaacccacaagaacaggggtgttttgccacctacagtaagaacactcatgtcaatacggcaggaccacttccttcttgtgtgtttctgaaaacacatatgggaactcctaatctctcattccctcttttctaaatgttataagacaatttgtaatactgtgttgacattatggattttggtttagagtttaggcatttaaaagacactggaccctacgtctgcgacagagcaattagcgaacacaggtgatgagtactgaacaacttgagtaaatgattccttgtgtccatgttacaatttccaagctccaattcatgctgacctagtttagttctagatgtgtattctcatgatgagatctgcagatacaacatgctcataatagattcagtttctaaagtgtcccttaaactggtttgtctacaactttcatgttgactgtttttttttttttttttttaaactccagatctaactgcactttatatatggctggtgatcagacagtaacccttttctgagtttagggtctacaatcctttcagattagacctcaaatggacacatcctgtacgtggacagcagagctatggaaaacaagagggatgcatttgtaaccctctgtttacactacaacctaacttcttcagcagctgagtccttgtcaagccaaaaggagtgatagtagaaaattatattcgtacagccaacatttaattgttgacatacagaaaatacttttttttcagttaatttcttaattataggcgagatctatgttcccagcgcagatacttgatgggtgtctatttaataatgtgaatatttagtttgctttcacgaaggagtgcaggtcataagacatacttactaccaaaataactctctacaatgatcctgattattctgcttaactgatctctgggcactgaataatattgactggaaaggcacaaaagaacattccttgcttttctgctctttgtgagtggacatggcaaggaagaaaatcctttcacctttgcacaatcaaagctgcttttggtcttttggataatgtcagactaatcattgagtcaagagattggaccaaatctttaacaattcagagtaaaatgaattcagggctcccctgttctctagggcccccaggctattttccccaaaatgtacaggtattgtgagtaacttattactaggtgtcttgtctctttcctatctaaacctgcagttcacagtgcaaggtcggcacagagtgtgagactgtactctttatgcagtggattttaaatcactggaacaaaaaaatgtaaaatgtggaaatgtgagagctgatcgtattaattgaagctattgttccacaaattttaggagattgtatccagtagcagagaaattggttcatggttagtagattctgacaaaatattttttttaatattatttacttatttctgaaaataacaaaaagcttgtttaaaaaatttttatttttaaaagtctacccagttaactcgcttgactagatcagagtgctactgagaaaaaagttttagctttcttctcttcacaaatatctttacttaacgtcttgcccttcagtgctagataaccagcaggcaagtgagactcgctaaaaactgtgggtggtggaatggatcctccgcactgagaggacagaacaacacgtgccattttctaatcactgcagcctgtgaacctctctaaataggcaaatgaggccaagggcgatggagggtcaatgagagctcgcggggtgacgccattctgctggggttctggagaggccaaagctggagacggtcccgtttgtggtcagcacggccttttactttctggccgtgactggcaactgcaccaacgtcctcctctccctcccactgcacactcccacttcctcagcgaccgggcccttctccacctcctgccacagcactcgcagcttctcccaagtgctagttaaccgcgggggctcaggcaaatccatggcccgcgtgggtgtgcggtgcggccctctgaggcctctggctcctggtctggcctggccgcgccggctccgggagctgccattccgccctgacgtcgccgcgtacacgtacctggggcggtgcagtcaccgctgcctctgccagttcgtgtgtgggacgccggccatcaccgcatttccgcgtggacgccggcagggtggaacgcctggctttccccggccaccccagccgccctggcgcctctcgcgcgacttggcctcggcccctcgggggcagtgcactgctgcgcatgcggtctcagcgcccggccttcccgcgcggctgccgccctttccacggtgacgccgtctgcactagcgccgcacccgcttcaactgcctgcaaccgccgctgaattccctcatccccacgctgagaggacgagaaaggcgccctggggaaggctctcgggaaagcccgcagccgctggacgcgggaggacatggaggtaggcgggaacactcaccccgcgatttcgtgtggtccgcgaagctttttctcttcaggacaacactgcacaatggcatccattaataatacgatggggaacgggggccgcggcgctcgcctgcagtcccagcgctttggcaggccaaggcgggcagatcgcttgagctcaacagttccagaccagcctgggcaatacagcgagaacccatcgctaccagaaatgtaaaaaattagccgggctagtggcgcctgcctttagtcctagttacttgggaggctgaagcgggaggatcgcttgagaccaggagtttgaggcttcagtgagctctaatcacaccactgcactccagcctgggcaactgagcaaaaccctatctctaaaaaaagaaaaaagcgccgagattgtgccactgcactccagcctggacgacagagcaagactcagtctcaaaacaaaaacaaaaacaaacaaacaaacaaacaaaaagcggcagggatgtgaatgtgaatggagcaaggcgttctctctttcaggggtctcagactttgtatctttgcttgcaggtggactgactgccccatgtccttcaaagttaattgcaaaagagttcattgcaagagatgatgtgctggtggaaagatagatgctgctacttctttccttagtggggttttacaggcagataatgactgctttgcagctcatttgtgactctgattccactgagcggtaatgtcattagatcagatacaagagtaaggagacagcatggcagaaacgcacgtgtgtgtctgtggtgagtgttttctggggtacacttgttcccacaggcctttttgttctgaattttccagacccctgtgcagatgacactgttacttcctcaggctgttacctgccccctcaggccctaagcaggtaacatgtatctgcctaagagcagtgtttcctttacatttcaggttatatgtcacttacaacatcaatttaagtgcggcaaacattcgttattctaggttagcataaaatggattagaaaatttcacagaggactatgcatggtagtgagtcagttgtgtatatgtgtgtgtgaaatgtgtttcttacaccgatataaaagtttgaaagtcactgctttagagagtttctgttggaacaagcttccaagcaacccatatgtctgtactagaggaaaatctaggaatatcactttaaggaaacatagggtcgtgtatgggaagatatggactcaaagagtttgtagagcaaggaaatcacagctgcttagcatgggagagtttgccaggataaatgatgatgatatgttgacagtgattatgttaatcatgctaattatgataaaaatgaaacttttttcaactcatgcattttcaccttttgacatttctgaagtaggaatattttaagatttagtggcaagtcatagtttttacttcatattttcctttaaaatttacactaaaaaaaggtgcgcttctctgattactgtaaaaataaatgaaattacatctatttccatgaactacttagttcctgtaatggctagttttgtgtcaacgtgactaggctgtagtacccagatatttggttaaacaccagtctgagtgttgctgtgaaagtatttttttcagatgacattaacatttagattggtagactttgagtaaagtagattaccctccatgatgtggatgggcctgatccaattcagttgaaggccttaagagaaaacagactcaggtcctacaaggaaggaggagttcttacatctgctttcaagctacagctgtaacatcaacttttctcagagtctccagcctaccctgaagagttctgatttgccaacccccatattgagttagccagtttcttcagataagtacccccacctcttcacacacacacacacacacacatcttctgttgattctgtttctctggagacccctaatacagttgtactacaaacttcccagaagttatataaaataaagcacatcttgatcaaatttggatacgtttttgccttttttttacagcctcaaactctttaggttaatgcgtagttttcaaatttcttttctcatgttcaaatagctgtttcttcaagcaggacagtctttccttatattttcagttcagatttcctcattggattattagaggttaaaaaaattatagacattgcaaaaagggaaaaggggaaaccaacttacgtctatactactttatcttctgatttccgaaagggaaaagaagtttgttgcaatcttctgtgtttcttattaagcctctgaattttttcactgctctgtcttatagttttagtatgcttagcctggtgtgtactagacattgcctctggcactacaccacatgcatttagtgtgggcctatataaacttagtcaagcaactgtgttagaaaaaaattttattctgtggtgaaataaatcttagaatttgaatttacattcttgcattttttttttttttttttgcaaggagaaaatcctataggcatctttctaaccatccacccaactaggaattgggaatccaaaaaaattgagaatccactcaatttttatatacctgcagtattaattataacaggattgatgagactgttacaaggttgtaagcattttcaacagtttatgaaaaacataatgtctccctctccctctccagtctccctctccctctccacggtctccctctccctctccacggtctccctctccctctccacggtctccctctccctctctttccatggtctccctctgatgccgagcggaagctggactgtactgccgccatcttggctcactgcaacctccctgcctgattctactgccttagcctgcccagtgcctgggattgcagggggcgccacgacgcctgactggttttcgtatttttttggtggagacggggtttcgctgtgttggctgggctggactccagctcctaaccgcgagtgatctgccagcctcggcctcctgaggtgctgggattgcagacggagtctcgttcactcagtgctcaatgttgcccaggctggagcgcagtggcatgatctcagctcgctacaacctccacctcccagccgcctgccttggcctcccaaagtgccgagattgcagcctctgcctggccaccaccccgtctgggaagtgaggagcatctctgcctggctgcccatcgtctgggatgtgaggagcccctctgcccggctgcccagtctgggaagtgaggagcgcctcttcctggccgccatcccgtctaggaagtgaggagcgtctctgcccggctgcccatcgtctgagatgtggggagcgcctctgccccgctgccccgtctgggatgtgaggagcgcctctgcccggccgcaaccccgtctggaaggtgagcagcgtctctgcccgaccgccccatctgagaagtgaggagcccctccgcctggcagccgccccgtctgagaagtgaggagcccctccgcctggcagccgccccatctggaaagtgaggagcgtctccgcccggcagccgccctgtctgggaggtggggggcagcccccgcccagccagccgccctgtccgggagggaggtggggggcagcccccacccggctagccgccctgtccgggagggaggtggggggcgcctccacctggccgccgccccgtctgggaggtgggggacgcctctgcccggccgccccttctgggaggtgaggagcccctctgcccggccgccaccccgtctgggaggtgtaccccacagctcattgagaatgggccatgatgacgatggcggttttgttgaatagaaaagggggaaatgtggggaaaagatagagaaatcagactgtggctgtgtctgtgtagaaggaggtagacataggagactccattttgttctgtactaagaaaaattattctgccttgggatgctgttatctatgaccttaaccccaaccccatgctctctgaaacatgtgctgtgtccactcagggttaaatggattaagggcggtgcaagatgtgctttgttaaacagatgcttgaaggcagcatgctcattaagagtcatcaccactccctaatctcaagtacccagggacacaaacactgcggaaggccgcagggccctctgcctaggaaaaccagagacccttgttcacttgtttatctgctgaccttccctccactattgtcctatgaccctgccaaatccccctctgtgagaaacacccaagaatgatcaataaatactaaaaaaaaaaaaaaaaaaaccataacgtataacttttaatgagaaatttttctgagtgctctaacaaatactgcttcacattgctaacactcagtctagttttagaaaatatatatgaaatcctctattgtatcaaaaatgtttatcatttttagtaaataaatgaacctccatctactgtttgtcagtagctcttgctctgcagtttggggttggcaacctcctacagaacagatgccccttcaacctatatacactttatctcctttgaaccactgtagttttggtctctgttacagcagcgtaataatcaagtaataatcaagacctatatgaagaaaactggaaatctttcctgaaggaataaaagatctacatgcatatatagacaggaataattcctaacattcattgaggttttactgtgctagtcattatattgagtaccaatttctcattacttaagtctctgcagaaacctttcaagactggtgtttttgccaccctttacagataaagacaacagggttcagagaggtgggtttattgaccaaggattcatagtcaagtgaggcatcaggacccatagcaagtacttaatgacatgatcccacccccgtgcttcagttcctttgttcattatccacatggaagtcttggtcctgcaaacatggtaaattttccagacattaatttaaaaatgtagttcaatactaaccacagtcaataagatactgttttgggttaggaggaaactagctgtgactttaacttggtagagcagaacatagtgacaaccatgaaaagtctaaattagaaaaatagataatgattgatgccttgttctactagatgacaaaatatactatacatcaacagctattaaaagtgttacaaatgtgaatgaaataaaataaatgaataaatattaatagaattgatattcctgaaataaatttgcacatatatgaaattttgaatatggtaaaggtataatttgaagcaaataatgaaaatacagctagcgaaataaattgttttgggacaattgactgaacatttggaaaacaacatctgtcttacacacacacacacacacacacacacacacactctgcagatgcagtgaattgaaaacctaaacataaaatagaaaaccataaaacgagaagataaatacaatctggaagatcgcaggccatttctaagcataactccaagcatgaaggcttatcatgccctttacttcttccaaatagtctgaaaatatgaaattccatacatctagggtctctaagacatttattacctgggcctgagggatctctcagacctcacttcccaccactctttcccttactctctttcagccacaccagcctttctacacatgtagcccttcctcttccaaagccttgatactggctactccctccccttgggatgccctccatacccatgctgtgtgacttcctcctttgtttcaggggagagcgcaagtggcagtccctagacctcatgtcaccttctccaggctcaccctgcatggcagttgatcgtatctcttaaccgacattctcatttgcttgctttgttggtgaatattctctcttcccgaacttttgcatcctatgaaagcagggatatcagttatttattcctgcatcttcagcctccaatacaggctgcatacataaaccatgtttaaataataattcatttctttgaatgaaataatgaacagtcccacaactagaaggcataaaggcatgattgatagtttatttaatacatataacatttaaaacttttgtaccacaaaggaaacaaacaaaacatagcaaaaggataaaacgtcccactagaaaaacgattcaacacttatatgatgacaaagatgtgtagaatcatgtcaactaccgctacaaatcagtaagcaaaaaggtaaaacaatgaaaatttaagaaaaaaacaatttattgaagaaacacaaatagccccaaaacataccagaagatgttaaacctcactaatgattaaatcaatgccaaataaaatgatactgaggtaagatttgcaagtaaaactaaagttactaacaaaatcaaatgttagtgaaactgtgagaatatatgcctttgtacacattattggcaaaagtacgaatttggtgtctgaagggaaatttaaatatgtccacataatgtcaacatgttctataaggaaaaacaaactaaagcgctttttctattctctcactcaacaatcaacacagaagacttctgtgactaaaggtgatggggttaagcccatacaccaagcaaacaatcaatcctatggcagacaccagctgggtgtccttcaattcagttttgacactatctacctggaaataacgccaggtctgctgggtgagggctaagtctcataagacatccccgtttccaataccaattataagcctcaagttctttttacctgtgtgtctgaccagtcaatcagctgtaagtctgggttaccacagcccccttcttgggttcaattaatttgctagagcagcccacagaactcatggaggcatctacatttagcagtttattgtaaaggatatcgcaagagatgcagatgaagagatgcatagggtgaggtatagggaaaggctgtggagcttgcatgctctctccaggttcaccaccttccaggaacctccacgtcttcagctatctggaagccctctgaacccagtccttgagggtttttatggaggcatcattctgtaggcatgactgattaaatcactggccattggtgttctgcttaacattcatcccttcttccctccatggaggttgggggctgggtctgactatcttaattctctaattctgccttggtctttcaggtgcccagctcccatcctgaagctacgtagggactactagccatttgtcaactcattaacatacaagtaccactttaaggaatccaaggattttagtagttgtatgcctggaaacctgttgaagaccaaatatatgcttcagagtatatacatgtgaataccatttgattttttattctaaaatttatcttgagctactagtcaagtttgcaaggatttcaatacacatgaacttattgtagctttgtttgtaataatgaaaatgagaaattccacggtgattaggtttgaaatatacctgtgcacagcatgtgttgagatgagaaaatatctgtgatctattaagtgaatttatttgccaagaaatcttgagcctgctattccctgggttagtttctgaattcttgcattcctttcttaccatgagaagcttgccatgttgagggtgattataatttttaaagtttatattttttactctatctggctcataatacctgacctaaagttctgacagaagctggaagataaactggtgtgtgagaaattaccttagtctgggtgtttccaaggcagaagctgtgtccagtgcacatgttctgtgatcccagagagcaggaaagggcaaggacaaagagggtttggccatgaccaagggtgactggtgctccatccttctggaaactgggagctttgtgaaatgcatcttacttcaggaagtgtgtctccactggcttacatccccacagtcaatgtggcctgggtccttcactctccacatttctcagctgtgcatgctgtggtgatgcatgaccctcacagtgtgcagcatgggaggaaacccatacatgaagtagagggttcacagagcaggtttgggatgatccaggttttctgtcctgtgagaagccatcaaagcctatggttgctgcaagaggaataaaagaaaagatggagcctagaaaattctgacatattcggctgaaaagggacctggcatcgaaagacaagtggtgtccaatatggcatgttagcattttcctcttcatttactataacttaaatccaagtaagatgggacttccctctatttagaaaggtcttctttcactttctttcaggatttactgcctcaagatggttatgttggaggattccaatagttctactggatgtggagccagaaattgtgtggaatgcctggtgtttctttcagttcttggatgccaatctgaggtacaaatcacatttcaagtgtatttccttgggttctggagaggatgtcttcattttctgttaagcatttagggagcagttgggtgagcacatgaccaatcagcctgagcatttaaggcagttggaggagagtgtgagttatggtcatcattctcctctgtgccaaacaggggctgatggatggtcagggcaaagcacagtgctgtcctcatggttctgggagggtctgcgttgtctgctatccccacataaactgatgaggacctgcactcctgtcctgagttgacacccagccttgaggtcaagaagatgacagatatttggggtaacgggtcccagagggtcctactgccacttcctcattgctttctctggaggttctaccaacttgactactgagcttaaacaaagccatgaactggcagatgaaaattacagtgcatccaaactccagagatttttaattagtcttttcaagaggttagggaaagtttttagtattcagattgaagtttttcttcagatcttgaatgtttgaaaatttttttattttagcttttagtggacatataataattgaacatatttctggggtaaacagtgatgtttggaagcacataatgtatagtgatcagataagtgtgattagaatatccatcatctcaaacatttatcgtttcttcgtgctgggaacattcaatatcctccttctagctgtttgaaaatacagaatatattattgttatggtcatcccgcagtggtatagaacactagaacttactcctccaatggagctgtaattttgtatcctttaacaaatctcttctcattcccccacccctgctatccattcccagcctcaagtatcctctgttctacttatttctatgagatcaacccttttttagctttcacagatgaatgagaacatgcagtatttaactttctcaaaaattttatctaatactttaaaagttatgatttcccccatttgtttctgtttcttcggtctttgggttctaaactgagtaaaaaatgtcagtaacttgatttcctaccttcctgactcataataatgttatcatgtgtctctgactcctagagtacctgctgtctgcttttttacttccccttcccccacccccaagcccccaaaattgtataattattttttaaatttcattttagtttgtttttaattcacaaataacaattgtacacacttatggggtgcagtatgatgttttgatacatgtatacttgtgtaatgatcaaatcaaggtaattaacatatccattacctcaaacacttgtcatttctttgtggtgagagcgttcaaaatcctgtcttcacaacatgcatgaacctagaagacattgtgttaagtgaaataagccaaacacaaagggacaaatcctgcatgatctcacccatatttcatgtttagccaactgttaaagaaggaaaaagcatgggccagtttacaaatgaatctgcattatacaccagcaacagaaagaagcaaatggcattaaaccacagtacccctccaggtgttgctgaaagatggtgaggaagggaaacttcccagtggtcaaactacaggcagtttagctggttgttaattttttatagaaggagacaggcacagaagtttggatatgcactgatttaggagcattggataacaagttattattttgctgagagatttgtgaagaataaggctggaaaattaatggcaggcaaatctggagaagaggacattgaagaatttcctgaaaagtgcacagatcatgaagatatctgtctgacataaatgcccatgagagggcatccactgcagagatggatcttggtggtatggtagataagatgactcatctagtaggtaatcagtcaatctcttttgccagcaggcttgctcattgagcctatgagaaatttaacatggaagcagggatggaaactatgaatgggctcagcattatgacatttctctcaccaaggttagcatgtgatttggcactatttccaggcgtctggctggactagtagcatagtgattactctggactcctttgagcatagagtaagcaatgttagtctttatagggacagaataatattgtggggacagttttgtcttccatgcccgaaccatttacatagtgaacaaagccttaatcatcaccatggcatcccctgcaatatcacctgtaaccaggaaacatatttcacagcaaaaggggtgtggcaatagaattgcccttggaattcatgattcatacttcatacctcaatattcagaagcagtgggcttgactgaatgatggaatgggctttattgaatgatggaatggcctgctgaaggtttagttattgaagctgagaaacaatactgtgtaaataagcactgctttcctgcaggctgcagtgtatgccctaaacctgcagtcaccgtaacctgatacatgagtccagaaaccaacaagacatgagagtgtctcgtacatgatgcataataatccagttgaagaatgttgcttcacttcactgaaagtttgggtttggtgtgatggttcattttacatatcaacttggttggactatggtgcccagtttttgttcaaacacaagcctcggtgttactgtgaaggtgtttttttttttttttttttttttttttgatgcgattaacatttaaatcagtagacttttagtaaagcagattaccctttataatgtgagtgggtctcatcccatcagttgaaagccttaagagaaaagactgacctgcttccaaaaagagggaattttgcctccagactttgaactcaagctgcaacatcaacctctgtcaaaatttacagcctgctggcttgccctgcaaatttcagacttgccagttccctaaattgtgtgagcctatttcttaactctcaatctctctcactcttttttctctctctccccctcagggtgtgtgtgtgtgtgtgtattctcttttacacatatttttggttctgtttctctggagaaccctgactaatacagtgaattggaagatcctagtacgaaaggaaagactactttaatgactactttcatattatatacatatatataataaaatcaaaaacaggaactgccacatggttttggtcttcccatgcctttgaatcatcaggcagagaatgaggttactctattgatagaggtgaactctagtgataggttactctattgatagaagttctttaacatctggaaagactagctgttgtaaattaggactcgtttgtcctttagatacactgtatacatagataagtaaaacaaaatgcacaatcataagaaacaatggtgaatctcgcctcactgtaagcacactggcttagagctctctgcacctcccttttcccctccttccctgaaccagtccacaaacaccatgccatcccccccccacaaaataacatttcctatgaattttaacaaaaagttatttacaaaatgtgtcattttactacctctaattttaacatgtatcaggtacttcagaacatctagaagaaacagacatctcaaaaaagcttagcgttgttacctctatatacagaagtaataaaatgcacacaaaacaatggatagaatatgaaaatgtcttggaaatacgacccgtcaggactaggtaggtctcgcccaactgcgacagagcggtcgcccaggacgtggacctgccggccgcctctggaccgccttcctcgccctccacagcctaacggcctccgggcgcatttgggcggcgccatgtttcctccccgcttaccgccgccacccgaaggcgctgagtcccggcggctcggcgcggtcttggtctgggtcggtggggttgggccgggagacccgcggccggcggggtccaggctgggggaggccgccgctgccaccaggtccccgaggtagggtaggaagaggttcgccgcggcttcaaggcctgggccgagcgggggagccacagcgagggttccggagcctgcaaggcggagtcccgggctcagctcaccccaggcgcaggcctgagggctgggagggctccgggggctctggggaacaggccggctccggtctccccgcgcgctctcagcgtcgtcaaagtttattatccacggagcgtcctggaatccacccgcttcggatactgaggaacagctgaacaacaacgcaaggagtttacaaaacaagatgacagtcaacatgtgtatatatagcaaaaaccaacaacgcaattgaacaaaactatgataattagcaaataataaatgtattttcttggtctggaaatggcatgagcacactcctttcagatttccatctaccttgagctcaaacaatattagaagaaaaacgacatcccaagtgccctgtcttccaaggtcactttgctcgatgtaaacttgatcttccttctcagaaggcactggagtctctaaatttgcgccagcttgcctgcagagccacagcagttctctaataccatgtgccggagggcgctcttcacctccgtgttcctcagggtgtaaataagtgggttcagcgcaggagtgactacggtgtagaacagagctatgaacttgccctgctcatgggaggtgctcttggctggctggagatacatgaagatgatgctcccgtaaaacagagacaccacagccacgtgggaagaacaggtgttgaatgcctttctccgcccttctgctgacctgatcttcaacacggcccgggcaatgtggccgtaagagaccaggatgagccccagaggcaggacaacaaagacaaagctggccaggtacatctccatctcattgaggctggtatccacacaagccagttgcataatgaggggcatctcgcaaaagaagtggtcgatgcaattgttcccacacagcggtaggagcatggtgagcgtggagcccaccatgctggtggtcagaccccccagccaggaggccaaagctagcccaaggcaaagctgtggatgcataatgacagtgtaatggagtggcctgcagatggcagcgtagcggtcataggacatggtggccagcaggacacactcggttgcccccagccaatgggagatatagaactggaccacacaccctccatagcttatggttttctgtggtccccagaggttagccaggagctgtgggacaatgctcgtggtgaagctcatgtccaggaaggggaggttggcaagaaagaagtacataggtgtgtggaggtgcacatctgtatgggagaccagaatgatgatgccattgcccaagatcgataccatgtaaaaactcaagacaactatgaagaggacagtttctagtgagggtcgtgtggagaagcccaggaggacaaagacttctggagaactcacattggctatttccatcattgtatgctgggggtggggcaaaaggccacctgtgggaagagcacagggcatacagggcatgagacatgaagcaattacatcagttagcaaacattaaaagtgtattttagttcattttatgttattcttttttagagacacaatttcactgtgttgcccgggctaacttcaaactcttgggatcaagcaatcctcccacctcaacttccttggtaggttgagaatacaggcacgtactaccatgtctggctaaaagtacattttatacccattgttttcaaaagtagccactcaacagctacgtggatggcattgcattaccttcctcacggccaacttggactgtataataaaagactgggtggggggtgttcactgtctggggaaaatggacattcatgcaaaatccttagcactgcttttttaaaatggaaatattatagtaacaacatctatatgcaacctaaatgtttagcaataaagggttagtcaggtagagggtggtcattcatgtgatgaaccactgtacaggcattaaaattgtgccctctcaaattccacaatcatctgcaagtttttgctgtcgttaactatatccagttttttatcccttctcaccacccctgctcctgccactctggcccatcttgccatcatttatcatctgaattttgatctaatactctaactcatctctctgcttctcctttgctccccttccaagtactctcaaaaaagtgttggggctcagaaaatgataccccaccatgaaggcttcagaagcaaaagtttctctttctcctgccttcttgtccgtggcccctcattcttccccgcagttagccatagaaattagaatccctcttccccaaggtgacacatagaaaccagagccccttttcctcaaagccagccataaaacctaaaaatgttactctaactttccctccacctttctgtgttaaaactagccataaataaattatctgacctaccttactggattgtagatcataagacctccattccagagaggtcttattgcataccaagaaaaaaggaacactgctcagagaggccaaaaagaatctcacgatgggtcttgctgggcttcttcactcagtccatcagtattagatcatgcccttcatgttcaatcatatttctacatggctgtccatatggctttgaacctaagcataaaaatgggaagtttctcttgtatctttggattctcatctgaaggctcctctgttatgtaaaactatgatcaaataaatgtgtatgtcttttctcctatgaatctgccatttgtcagttgatttctgtgaaatttcagaggacaaaggtgaaattttccctcactcctacgaaagcaatcacaggattacattaagacatatgatcacatcagtctgctgctcaacaccctcattgtcttggtacaaggcttgcagctgcagtttgctatacttacagtgctttctccccaagacatccacacacccccttcctcaccttcttcaggtcatttttgaaaagtcaccttctgactgaggccctccctgactgtgttatataatattgaaaaccctcacaactcccttctctctctttcctgaattatttttatataaggtgataatcttataacaaataaactactcttatttcttttgtttgctacccgtctcgctccactagatcataaattccatggagccatagttttatcttttgtttacctctgggtccccagtgtctaacccagtgtctgatacacagtagtcccttaatcaatattcatggacgtgcatcatgaaacaggttgctagaaaggttctgtggggtggaagaggcaggactagagtaatatgaaggcagagtggaaggactcagcataaactttcggtagtgttgtcaggagagagctcttggaactgccagagtcatgcagaagggtctggactatcctctgcttttgtacagttggaataaaacgagcacgatttagcaggggcagtgcataaagtcagaaactggacaatttcagtgtgcttccgatgtccctgaagacctttggggcccttctttgcaaaacattaattctagcctgtattttaaaaaggagaatcaatttattatagttaagattcacccagattaggggaacagagcagctgtgaacttaactatcagccttcttaaaatcccagagagtagaatttacctatccctgtaactggaagtcaattaaacaaaatagacatgaacagacatgtgcattcagttttaaaaatacaggtaggttttccattgtgcatgtatagaaatgaggctcagaaaactctaggcatttgttaaaattcacacgtggaagctgtcccattgtggacttactgtgtcagaatactgagacaatcatctggcctgcatatagtaggccagggaagcattaatactatgggagaaggcatcctggagaatacattccaacctcctccaaatcagggaggcaagccgggggcggtggctcatgcctgtattcctagcactttgggaggctgaagtggggggaatcacttgagctcaggagtttgagaccagcttgggcaacatagtgagagattgtctttacaaaaaaataaaataaaatgactgagtgtggctgtgtgtgcctgtagtctcagctacttgggaagctgaggctagaggatggcttcaacccacgagatcaaggctgtaatgaggcatgattgtgctactgcactccagcctgggcaacagagcaagaccctgtctcaaaacaacaacaaacaaaccaatcagggaggtagagttgagacctgtcaaaacgtggatgttttcatcatgtgaatgtgagagagaaaagatgaactgggattgggagagttaggtacaactgagtcatgacagtcaaagtgggtgtactgtatatagagtcaccgcaggtgagctgaaaaacaacaggttaaactgacaactgcattatgacccgtgggtgtaagtatatcccatctgtggaaagataaaaattttgttgactcacagttgataacatgcagaaaatgtgtaaatgatgctgagaggaaccacaaggtcactcatgaggtaatagtttagtagaatttttgaggaaaaagagatctttgtggtgatctgatctacttctagaaatgtttagtaacttatccaaagcccctgggctgcttagtcatactggagctatacccaagatactcagattcttagtacaaaaatagcgttttcagtaaaggaagaggtttgcttacccgcagagattcaccaaaattgtcacaattaaaaactcacttttcaaaatgcaaccctatcccaaacactgtgccattaagacaaagatagcatactgaaagttaaggaaacgtcttgagttcaaattttgtctgagttaactaggcagtcacaaactgtatcgcagaacataggcaagctgctagaatatcaaaggccacatgaggaaatcagatcatttaaacggatcagtgcttatcaattttaactggaattaccagaaagtctgagatccagtttatcttaaataccataaacaacaacaacaacaaacaaacgacaaaattcaaaatgtcacttactaatggtgagctagcagcatcatctctatttatgcagggtggaaatgttgtaaaatgggcaatattttattaaaaagactgataacattcatgaattcaatgcgtgtggcattaaaaaaataggagtttagccaggggattttaaagccctgcaaatagtggaaatctctaagtcggtggtagcagacgtgttagattctgttcaaattcatgtctaaaggacacattattaagtatttaaatcacaatgggattgaactagcagaaagcacttaaaatactttgtaagaaaattgataatcaaaggagtgagaatggctcatggtgtttccagaatgagaaagtatatgcagaccctaaagggtgaagtgtgacataaagtccttataattctaagacattgattgtaacccctggagccttcaggagggagcctgagggtgatggcatatatcaggggagtaaaagtggagggaaaaaagcttttgggatttctttccctattggataattataacttcattgtattacacacacagaattgtttcttttttatgactggaatattattttagtttttatactgccaaactgcttatggagcgtaagaatcaagtctctctatcatgtagtgagggagatagtctgagacatttgctcattctgttaattttgatacatgctgctatagactctttttttaaaaaaaccattgattttattattggtgtatacatcagtgatgagataatgtttttcttaataagttaaatttatcaatttatttttattttggtaaaatacagatagcatataaatttatcattgtaactattttaagtgtgcaagtcagtggaattaagttctttcacaagactgtaccatcacctctatcaagcgtcagaactttttcatcacctcaaatggaaaacctgtagccatcgagcagtcagtcttcatttgccagctctccctagccctgccagccactaatctgctttctctatgtatggatttgcctattttggatattacatataaatggacttatatcatacatgttattgtgtctggtttctttcatttaacatgatattttcaaggttcatctatgttgtagcgtgtatcagtacttcattctcttttaaagaggaataatattccattctatgactctaccaccttttgtttattcatctgttgacagacatttgggttagtttgttgatgaacatttgagttgtttctaccttttggctattgtgaatagagctgctatgaacattcacatacaagtttttgtttgaactccgtttctgattctactgggtatacctgggagtggaattgctaggtcttatggaaattctatgaacaacttactattgaaccagcaaacttttctgctgcagctaaacagtctttacatttctacaagcaatttgtgttccagtttctccacataatcaccagcacttgttattttccactttttacaatcttttttttttcctttatggccatcgtagtggatacaaagtggcatctcattgtggttttgatttgtgtttcccagcagctaataatgttgtgcattttttaatgtgcttgttggccacttacttgtcttctttggaaaaatgtctattcaagtcttttgcctattttttgattgggttgtttgtctttttgtaagtgttccttatatactctgaatattatacccttatgaaatacatgatttgcaaatattttctctcgctctgtatattgtcttttaactcttttgacaatgtctttttgatgaacaaaagtttctaattttgatgaagactaatttatctattttttttgttgttgtttttggttttcatgtcatatttaacaaaacagtgagacttccaaggtcatgaaaatgtacttctatgattacttctaagagtttataattttttgctctttcatttaggcttttgatgtattttgagttacgttttgtatatgctgtaaggtagggtccaacttcattctttagcaggtgtctatccagttgtgttgaactggatatatgtgttgaaaggattacactttctctattgacacccttgtcaaaaatcaagtgacataaacccatagacgtatgttagctagtatctagtctaatgggtccaaatatgaaccgtattctgaagactctctgaattatattcctggccagcacctctatgccaaacttcagattcacatatctaactgcctatactacagcttcatttggatggtgttatgaactgaattgtgccctacacccattcatatgttgaaaccataacccacaatgtgactatatttggagataaggcccttaaggggataattatgagtaaatgagtttataagagtggcagcctaatgtcataagattggaatacttataaaaagagtaagaaatactagctatcttccctccctgcctaccccagtctctttctttccacacatgcacagaggaaaggccagatgaggacacagcaagcaggcagatggctgcgagctggaagggaagcgtcatcagaaaccaaccctgagggtaccttgatcttggacttccagtctccagaactgtgagaaaatacatttctgttgcccgccaccacccagtttgtggtgttttgttatgatatctcgacctgcctaatacagatggctaatgcaaagctccagtgcaacactttagaaaacgaaccctgttgtacacctgacctcctccagctgcagtctcctcttctcagttgatgacaactgagaactctattcttccatttgcttagtccagaagcttggagtccatgtggttccaaacccatggcaccgtatgccaatcactgaaatgatgagttttgtggcagagaatgagtttatttatgagggagtcaagtgagaaagcaggagaacaggtctcaaatcagtctccctgaaaatgggattttagggatatttatgggatagaggagtgaggtggtccaaggtgtaggaaaatgtgattggggtaggaaaaaatgaggtaatcagtaatctgctcaaatatagtcaaacttcatggctcttcatagcacacatgttcacaaaatggtgtcattaacatgatctgagggtggagttttgggcactgtgacatctaaaggtcacccattggatattcacgcaggtccagttggggaccagtggtttcagctagcttgaactggacaagagttgaccctcgttcctgaaaagaacttaagcaatcgttaccacagtgatctatacatgagagatgttatctctgaggaaactggtggcagttttatttttttttattatatattgcttagctacgtgacctttagctatgaaaatcttaaaataaactagaaacaagtgaccgactaaaagcaagcgactaaagccagtgaggcaagttaagtctgggcctaatcaggggagccctcggcctcaaacattgacccctctcatttccacgacctctgttcctcacatataatctgtcagcaaatccttttgactctatttttaaagatatccagattacaatcatttttacaacgaatcaccctgtctcagctagattacttgtattaaaatcacaacgattttacttgaaaacgcttcactgacttcctacctgactctgtaaataccccatgttgtttcataatccatgagtatctactgtctgcgccttccccctccacacacattacctctctgatcccacttcccaccacttctcccattcctccctctactgtagcctcacaggcttcctcgctcctcaaaaacgccaggctctcacttgccatgctgcttttagctctgctggttcctctgcctagaatagtctctctctctctctctttttgatacagagtctcgcactgttgcctgggctgaagtgcagtggcccaatctcagcttactgcaacctctgcctcccgggattacaggcatgtgctaccacgcctgggtaattttttgtatttttagtagagatggggtttcaccatgttggccaggctggtctcgaactcctgacttcatcatccacctgcctaagcctcccaaagtgctgggattataggcttgagccaccacgcccagccagtttccatctcttaacaagtgcttggctgaggcctcacatctgtccttaaccttcacctcagaggcattttccctgatggtgttacttcgaattgtcaaacttatccttttcccacttctgctctatttctctccggagcactgttcagcacgtattgaagcattctacatgcttatttttacttatgtgtcttgttctgtcagaatagaagctcatgaaggcagtggtgtctactttgtttcttctgcatccccagtttccgagcatgggcacgaagatgcagcttaataaaggagtgctgatgtgtgagcagatgtatgaactgaaggtgggggcagtgaccactgtggggatgcaagagcaagtgggggagggaggccttactttattgcaaacgagcaagctttctgcaacgcgtcagaaggattagaaaggataagactgcactccgggttttgcagtttctcttttcttttcaattcacgtagaatacaatcactccactaccaaatatttgtcattcatgcatttcctaaactgtaaccacctgcaaggaaaaaaactcaagagcctttgagaaagttgtaatgtcttgcatatcctcatttttatatgttctctatttctgtttagaaggcattgagttactgagtattaaaaataaaagaaactgctgaaaagaatttttttcaaaaatgacacaaatattcttttaagtgacagttacactactcaagccttttattttttcatccagacatttctttacccatttggtcatagttttgtctaaacctatgctggtttaaattataaatcctgtgactattttcttgcaaaagctttttcaattttttttttcctattgaagctattaaaacaacaaggaaatgcctcttgctagttagagcaatgcattgcttataattaatgtcttttggcaatttcccagcaactgagcttctcagaactcaagtttccatggtatatccttgagcaaagcagtaggtttggcctcccatgtcatatggatcacagttggtggggtagaatattgagaactaattcagctattcattatatgtcggtattttccgcacggtctcatcatggcctatatggagtactcagtctcatccccaaatggctgaaactggggtgcagatggaaccaaggtggagcccaaataaaaaatcaggtctcctgcacacagaaaatgaatggtgttttcaaatcaaactacaagtcaaaaaacacacagacactccaaatttgagatgttggcctgaaacccggctgcttcttgaaatagaaaaacccttaggtgagcagtaatagggatttctatttttaagaatggcagaggactcctagaaaagatggatagaaaaacctggctgagcacagtggctcacatctgtaatctcagcactttgggaagctgaggtgggcggatcacttgaggtcaggagtttgagactagcctgcccaacatggtgaaaacctgtctctacaaaaaacacaaaaattagccaggcatggtggtgcgtgcctgtagtcccagctactcaggaggctgaggagggagaatcgcttgaacccaggaggcagaggttacagtgagccgagattgttccactgcagtccagcctgggcaacagagtgagactctgtctcaaaaaaaaagaaaaaaaaaaaaggaaaaagaaaagatgaatagacaaactaataactaataaatatgctttttgtgttttcataccgcaactaatttattttagaaaaaatgcaagccaagctgggcattgtggtgcatacctgtagtcccagctactggggaggctgaggcaggaggatcatttgagcccaggagttctaagctttagcatgctctgatcatgcctgggaatagccagttcatctcagccagggctacacagtgagaccttgtcttttaaaaaaaggaagaaagaagtaaaaagcaaagaaaatgaaagaaaatgtatgccagtatgatattttcaatgcaaagtaactccttgtagaatactggtggtccaaggagcagcatatggaaaaggtggaaggaaataattgcacagaaaatcccaaagtggatcattcagttcttgtaggtatattttgttctagactttgcatttttaaatgtactttgagtgtccaaatacctcaaatagaagagcgaattgctctctaggttttgggtttatgcaaacctgaaattttcagtatcaataaaatctttaaattttacttgctacatacttcatgaagggagatgttgcttgacattttaattttacctaaactaagcctgaaacaggttattttttaaactacagtatctagtcacccctgtgatgtgaaagctcctcttctacaaagaatgtcatgaatttagcaaacaagggcttctaatttaatgactatttgactagaattattaaaattctacttagtccaaaataaaattaccaagaagaatatgtaaaatacgtaggaaataaaaaatagaatttgccccagataatcagtggaggagtaattgtctacagttagttggcagcaagctgcatgagacctggtagaagacagaggatctgtgtagagctgtagaccagaataatatgaggaagcacatattctgcaaccaaatatctgtccttagcttccctaactgcaggatctaatcaacagcggagtcagcagggagcaccaagctggccttactcagtctcagggctagaatcagtgcccttgaaaacaaggctaaagaaatgcccatcgtttggatataatataagtaattgtctctagtacagtatgtctttcaattggaagcataagaacaagatgttcaaagttgttattaagcatgtgtcaaagcattagttattgatatattagtatttattgttatggtagccccccttatcagttacccacagtgtactacaataaggtattttgagagagacagaacacacattcaaatagcttttattacagtatattgttataattgttctattttttattattaatctcttgctgtgcctaatttatgaattaaactttatcataagtatgtataggaaaaacatagtatatacagggttccgtagtatccacggtttcaggcatccactgaactgggagggtcttggaaattatcccccatggataaggcggaacactgtattatagtaattatcgtggacaaagcagaaagtcaaaagagctggttctaaaagcatttgaataatagggacttatatggagttactccagaaacaaatacccaaactaagattactaaattatatatgaatttatttaactttctacttaaaataaatcaaaactacttgcttctctaccagccataagttattggtagtaacttatcaatttctgcaggttaacctctaatcttattaaaaaaatttttttagagacagagtctcactctgtcacccaggctggagtgcagtggcatgatcatagctcactgcagcttcaaactcctgggctcaagggatcctctaatatcagtctctggagtagctgggactgactacaagtgtgcgtcaccctggtttaacttctaattttatgtgaacaagagaacctttataagttgctaattcttatgtcaaacaattaaaacaatgggcaccagagcattgaaaaacaagctgagttgatcactgataaaggataggaccacatgtcactaaaagaaacacaccaagcaggctgctgaatgaaaacttcatgtgaggttgtagagagagagctcatgatggctgtgctgatgaaaggtcgaaattttgcatgcttggaaggacagaattaggccacagatctgtagacagcttgttaaaccgaattgtatcattcatcagtcaggaaaacatttttagttaggtcctgattctaaaagagttggtaaataagacctctccaagtttttcaacactattagctttgggttttatatccttcgaagtttctgttcatataacagcttctgcccggcagctgcacgtagggaaacacaactctcagctgtgatatattcaggcaagtggtgtcataaagagaaaccttccatttagatttgcaaatatattgtgaccacaaaggtacattccccacaagttccacatgaggatcaattaggctaatgagaaaattcttgtctgggcagggtggctcacacgtataatcccagcactttgagaggtgggtggatcgcttgagcccaggagttcaagacaacatggcaaacatggaaacatggacaacagggcaaaacgctgtctctaccaaaaaaaacaaaaacaataattatctgggcatggtggcatgccctgtagtcccagctactcgggagcccaaggcaggagaatcacttgagcctgggaggttgaagctgcagtgagcaaagatcacacgctgcactccagcctgggcaacagagcaggacctgtcttaaaacaaaaacaaaacaaaacaaaaacaaaaaagaactttttttagtatgaaataataacaacaaataaccaagcaatcttcattttgccttttaccaaatttgaggtaatttttttctatcatacaacaaatacaacaagatttaaatgtagtcaagcaatgacattgaaaacatttgaagccaaatatcccatttggtgaaatgctagctttttcattggttaattctcatcttattggtcattccttaaaaatgaaataattgagtcagatttgagagtttgtttctctaccctgtacttaggtaaggaattggttttggttccaatattatctgcaaatgagcagggactcgctgtcaacaggtatgccctgtttcagtgcacgtgcttggtctggccccatgccttgcaggactgactgagacaagatctcctactcctctggtgggcaactcctgttgtagatttaatattacaaatatgtacaattttttatataggcaaatttgccagctagtattaacaattataagcactgtcaataatactgtcaggatttatttgtaagaatattaactgtagcattattgcaacagaaaaactggacataacaacaaaaaaagaactggttgaaaactatcattatgatgattatgcaaaggggtactttgcacccattagtaatgatgttaagaaaatgtatttaatcatagtcatcctaacaggtatgagagccctcatcgtggttttgattcatatttccctaataattagtgatgttgagtatcttttcaaagacctcttggccatttgtatgtcttctttggagaggtgtctattcagtacctttgcccattttcaaaattgggttatgtttgtttatttagttatttttgctattgagctgtgtgagttccttaaattttttggtaattaaccccttattaaatatacggtttgcaaatattttctcccactccataggttgccttttcattctcattgttacagcatagtatctctagttaaacataaggtattgtgtacttaacaattcgtcaagagtgtagatctcatgttaattgttcttactacaaaaagaaaaaagaaaaaatcacgaagagctacaaggaaactgtcggagatgatagatatctttattaccttgactgtggtgatggtagcataaatgtacgcatatgtccaaactcatcaaattatgtacattaattatattcacgttcttttatatcaatatatcaacaaagctaggaaagaaagaaataaatttttgtttgttcgttttgttttgttttgtctaatgatgggacggtttcgctctgttgctcaggctgatgtgcagtagctattcacgggcatgatcattgcacactacagcttcgaactcctgggctcaagcaatcctcctgcttcagcctcccaagtggatgggactacaggcacatgctaccacacctggctgagaaaatggtctttattttttatttatttttatttttttgagacgagtctcgctctgtcacccaggctggagtgcagtggcgcgatctcggctcactgcaaactccgccttccgggttcacgccattctcctgcctcagcctcccgagtagctgggactacaggtgcccgccaccacgcctggctcattttttgtattttttttagtggagacagggtttcactgtgttagccaggatggtctcaatttcctgacctcatgatccacccgcctcggcctgccaaagtgctgggatgacaggtgtgagccaccgcgcccggctgaaaatggtctttaaaactgtattttatggcatgataacacttatgtgcaaaggatgatcctatttttggaaacttttaaatcaatgggtgcatgtttgttttcacaaagcaaggatgataaatgtgtgcaccagaattcacaagggggctggatgtggtggctcaagcctgtaatcccagcactttgggaggccaaggcaggaggatcgcttcaactcaggagtttgagaccagcctgggcaacgtaacaagaccttttctctactaaaattaaaaaaaaaaaaaaaaaagattagcctagtgtgatggcacacacctgtgttcccagctacttgggggatgaggagggaggatcgcttgagtctgggaggtacaggctgcagctgagccctgatcatgccattgtactccagcctgggcaacagaacaagaccctgtctcaaagacaaaaacaaacaaacaaaaaagcacaagaaggtagttgagggtagtaggattctgggttatttaaatattttattttttcttatttgtacttaattttctacatggcattgagaacttaaatcaagttgaatattgtgcatgtctttgttctcaaacagcagccatggccataataatggcaggatacctacggcttactgagactccctttcacgtagctcctatccattctgcagatggagaacgtgagttccaggagatttgtttaccagaccaatttatgctaggatgggacagaatgggagttagaggtgctgaaaagatggaaacctttcgtgttaccacatttctgtcattcggtgactaaaaactaacatggagctacttacttgagcatttgaggattaatgagcttatttgtgagtaatcagataagagaaacaaagatttatttcagtagctctcaaattttagtagggaacaggaggaatccacccctgagagtttctgattcagcaggttttaggtggatcttgagagtttgcatttctaataagttctcagagatgccggtgtttctggtcaaggacagcaatggcggaacacgcttcttagtgcctttaccgctccatggattggctggagtggcatcacctgggaacttgttagaaaggcaaaatattgatcccagtttgaaagagtcagaatctgcattttaacaggatcctcgggtgatttgcttacatgagaaagtttgggaagcagcactttggtacataggttgtcacatacgaattagataaatcataaatctgaaatggggtgtgtgacattcctgcttgtaatatatttttctcatgtttataatcgataaataaacaatacaaaacttataaataatgataaagcactccagactcctgagttctgctgctggttaacagtcaattaaacttcctcagtcctgatttcctcattgggagaaaaaaagagttggaataggtgagcatatagtttctgatttcagcaaatagattttgtgttggttggaagctgaagaaaatcaaccacctgtggtataaatccttcggcaggagacatcatgaataagcgatttcagtctcctgacagccacggctcagagtcagctgttagctgatctcctgccgctgatattgtggcctcgaaattatcactagaaccagcttgtgctttgtggctctggtgggcagcctaggggaggaagtgggggaccagatgctggcaacaggtcttccaggccctgcattttccccattgtcatgttagtctttgagctgacaaccagaacaatggcttcttaacctaccccaaataattttgataaccttctattctcatccttttttttcctttttctttcccatcttgtctttgaaagtatcagacctctgaggaaaggctattgacatttgatctgattatcgttgctagagccacaaagagaaattttatttctaacgttgtttttttcttttccccaagaagaggctttctctttgtatgtttggaagaggacaacatatttggaatcttgagatctcagatctctgtaatgagcagtttgcctaagaaatcatgaatccagattaatcacttttattccagcaaaaatgcaactctcttattgcattgtgtaatcttattattatgctcacttcggaggaatagggaagtccttaccttgtttcgtcttgcaatactagaatttccttgaaagcaaagtgaacctggagtgatagattcactttcatgtttcagcctgattttttcccactgtatgcccacgcgtgtgtgtatgagtgtgtgtgtgtgcgtgcaggcacacacacgcacactcacattttcctttctgcctcccctttcgagctcttcctgccttctctatcatgcgcaggcccctggcagctcgtggttggcaagagcacgaacccgtggtcagatgcaacgtcctgcctcatgcattttcctcttggtgctttggtcagaacttccccaagtggagtgaaactcaggagctgagaaaccgagtcactgtgaaaagatgggaaattatctcctgcgaaaactcaggtgagtcttgactcttggtgccgcctttcttgggagaaagagaacagagataaggaggctggacataacgcatttgtaatggtgaggtacattgtgcttctagaaggttaagcctgaagacagcatcctctaggagcacacagtgacgcccagttggctccttctcttgccttactctggaacaatgataggttgccagatgtagaaaacaaaaatactggatgctaagtcacattcaaattccagaaaaacatttttttttttagtatgaatgtgcctcatataatattttgggcattataacatgggttgtactttactaaaaagttattcattgtttatctgaaattcaaatttagcagtgcatcttgtatttcatctggcaaccctacacaattgtcacttgaattttcctgcttctctttttcttcatgtgggtgtagagcttaactttccatccatcagcttcgtgggttggtatgagaatgaacagttaggtccttgcaaattatggatgcgggatatgcatttgaatgcctttgactttagtcacaccttttttggtaatgtttagccttacactcttccaatacttcataatttatagaatgtgtacagataacaggcattattgttcttacatcttgcttaatcttaaatgatgggctctacagcatcccactcctctgtccgctctcccagtccccttccagacaatcttgcatatgacgtgactacattgatagacccaaggcaaaactctcatcatatcgctcctgtgctccagtgggtaccatgtagaaatatgactggacaaaaagggtatgacctaacgctaatagacggagtggaaaatcccagcaagtcttgttctgtctgtttagattcttcttgacctctctgtgcagcgttccttacttacgggtatggggcagaggactctctggaatgggggcttatgacctacagtcaaacaaagtaggtcagagaagctgtctttatgaggcagcagattggcttccccacacctgatggttcataccgtctcctttcaccaggttaaatagttcagctgtcccttgatgtcttcatttagtctttcagtaaattgctatttgttaaagagcttaagggtggctgggcacggtggctcatgtctgtaatcccagcactttgggaggccgaggcgggtggatcacgaggtcaggagatcgagaccattctggctaacacggtgaaactccgtctctactaaaaatacaaacaattagccgggcgtggtggtgggcacctgtaatcccagctactcggcaggctggggcaggagaatggcgtgaacccgggaggcggagcttgcagtgagccgagatcccgccactgcactccagcctgggcgacagagcaagactctgtctcaaataaacaaacaaacaaaaaaaaatgcttaagggttcatggatggagaagggccatcaaagttcaggatgagcatgagtctgggcagtagatggaggacaaatgacacaattgtgctgagaggtaaattcaattatttaccctaaagaaaaaatgtttcccttcttttaaagttaagcaatatttatggaaagcctaggtaagacaatggtcttggtcgcaagaaaaaattaaacatggaaggaaaatggatatggaagcaaattttaaaaatggataggccccttcagagaacatcgtacttaatcactctgactcagctttaaaaaaatagacattacgtggctcagataattaaaattgagagagaattaaaacttgtcaaggttgcctttgctataaaattatgaatcttacatgtaatttatgatgtcaagtcatccgtcatttccattacaccacaatggcttctttttaagataaggcaggtgctaatgtgttctaggcagaagcacaaacagcgcactgtagaaataaaaggaaggaaggaagggaattctggtttgggatagcaggaaggaaggacatgcttgaggaattgccatttggattgtgctgtaaatgttaggcagacttacaaagcaggaaaagatggtccaagctgaagggacaacctgtgaaaatgtatgagtttcaagtgtatggtattactgtcaataattggagcatattgttcagagatgactccagtagcagaagaagttgagaatgaagctgggggtctgataatgaagggccttcaaaggcacgtagaaagtggtaagcagtgaacatttataagctggagaaaaatgcaatgtggcatgtattttaggaagaaatgtctatgctcagtgagtatggaggaatgacacagagagaaatagacaataagctcttaaaatataccaaagaagatgcaggggcaaaaggaaaacttcccctttgctccctgaaggttctctgaaatcagctgagaaaaggcagattaataggacaaaaggcaaatttattgatcatcgttttatgtgacacaggaacctcagaatgaagacccaaagatgcaaaggaaactgtccatttctatgcttaggttcaacaaattttggatagccatgtggaaatatgattggacaaaaaggatatgacctaatgctaatagacagagtggaaaatcccagcaagtcttgttctgtctgtttagattcttctcgacctctctgtacagcattccttacttatgagtatggggcagaacactctctggaatgggggcttatgacctacagtcagacaaagtaggtcagataatgtctttatggctggttcttacacagaaagatacagggaaagttagagtcatcttactaattttatggctggctttggggaaaagaggttctggtttctatcaatcaccttggggaagagggattctaatttctatggctagccctgggtaggaaagagttgtcacagagaggagggcaggagaaagagagctgcttctgaggcttttattttggagtatcattttctgagccccaacaaagagatggtaaagagctgaaattcatcaggaacaaccaaaatgaagaggaaattcagtgaaagtaaatgcattcccaaggagtcaccttggtgtgtgtcagtcattgggatcacagatgtggtgtgagagaaggctggagaatggcctctagaacacggatgcagagagcctcctgttgctctgaccctgcttgtcagaggcctgttaccttgggcagtgcctaatttgcagcctgataattggctgcagatgagtctggggaaggtagctgctgctttctagcccctgactagcaagagggtgaagtaaatgtagacatcgcccatgggcagtgtccatcacataccctctttagtctttatttcaaaattgatttagttctttgaagactttatcctcccatataaatttgtacacaaattctgaatttgtgtattatataaaaagtgccagcttgaatttggattcagacaacattgtgaatatagagatctatttgcaaattcttctatgtttatgcagatgtactatatgtatatatattttgagatggagtcttgctctgtcacccaggctggagggcagtggcatgatctcggctcactgcaacctccaccttccaggttcaagcgattcttctgcctcagcctaccgagtagctgggactacaggcacgcaccaccatgcccgtctaagttttgtatttttagtggagacggggtttcaccatattggccaggctggtcttgaactcctgaccttgtgatctacctgcctcggcctcctaaagtgctgggattacaggcgtgagccactgcgcctggtctatgcagatatactattaatacaccaatcaaaacaattatttataattatctttattcaaatcttctttaatgcattctgatagagctttaattttttgtttttattttattctttgttagatagatttctagataccatatgcaacagtaataaatctatgaatgacattttttcctagcctgttattgttggaatgctattgaattttgcaagatgactttgtatccactagccttgttgaatttctcattttttttcatggttttttaatcctactgggtttacatagttaatatatcatctataaagttaaagatttttctattctttttttgttccttacaagtcttataggtacctttatcatgttttatagcatagttatgtcagaattcttaggcatcattttcttgtaactgatcataataatttttttctaaattgttttcatcaaggttgctgtatatttttgacatttatatttggcatttatgtttttggcatattgcctctatcaaaataaggagattctactttttaaaaaaatatgtagagatgagatttcactatgttgcccggtctggagtgcagtggctattcacagatgcaatcagagtgcactacagctttgaactcctggcctcaagtgatcttcctgcctcagcctcccaaggagctgggattacaggcctgcaccactgcacccagctcttctgagggtttttattgttaataaggaccaaacattatcaaatgcagttttaaactattgagataacctcatgattcttctcttaggcttctaaagtagttaattatgttaataaatatttttgctaattacctatcttttaatttctgggataaaacccatttgattgtgatgtgtgcaattttactatagttttagatttagttaacttatattttattgaggattattgcatctattttcatgatcgagttggacctgtgatttttaaaaatttgatttatttaatttgaaatgaaagtttaccaatctcattaaatgggttggcatcattttacatttctctactttctggaacatcttatatatgagagagtatatttgtcacttgaagtttggtaaattgtgtacgcagctgtgtaagctggatttttttgttattgatgttattcatgtgtcagtttttatatttcattttttccaagatattattcattttaagccataatgtttattatacataattcttcatcatgcctgttttatgtctgtaatacttattttgaactttctgttttcattatatttttgtctccattccttatttctttagttggtctttccagacttttgctatcttactgatattattcttttctaagatttggttccctatcatatttatttttacccacaactttcttgtttcctttttcttctcccaacttcttaagataaatgcttactttgtcattattagtcatttatgttttcttatgaatgtattttagcaagctattttcttcacacttcactttatccttcaaatagtcttgtgtagcttgcattattattttattctgtgtttttagaaagttcctttatgattccctctttaacataaggattatttagaatattacttgtgcctagacaggtacacttttggttatagcttattgggttttaattttactgcttgatagttggagaaatcatgtgcaaattgttgattttgggggatgtttactaagactttctttgtagagttatgaagtcataagtcaacatccaacatttagaaagtttaaaaataagaagaaaaaacacagaaggtataaaaaattattcataatcttaattctttggccaagatacatctaaagcttaataaaatacctatttttgaaaacaatagagtattagttgatttattaatttggtcaacaaatttttgtacatcacctatggcctgatattatctgaattcctctggattaagaaaaacactttttactttattcacagtagaatttagtatccagttatattcagtaatattaatggtgtggaattccaattaggtccctactgatgttaaatacttttcctgtcttgttttcaactttaaaatacaaacatcctttagatgtgtaagtcaatgaatcactaataaccccaaggacaattattttaccaaattctttctttattgaccagtttaggaagatggaatcgtgagaaaactagactccaggaaaaggggaaaaaaggagacagttaaattactttttacctgatttacaatctacactattaaataaacattacatccagatttgactgtgatcgtgactattatacaaaatctctacatcagcaactgattctataaaaagcccccacctctgtaaattgatattcctttatatttaacaaatatattctttgcttagtggctttgtgtgttgatatctagcaatgtttcttgaacatatacatatgacctctattcagggaaggcactttctcagcgttggttcgaaatgctttccccgaatactgctggtaagcagaagtgaggctcttatatgcaaagctacctagaagcagaaggatagaccagtgctgcagaagtgacaatagaggaaaagaaaaccatcaaggaaatgctatgtgtggacaactggtggagtagaaagtttgattaaccaagtcacaaacataagctgctaactattgtgttaaccacgcaaatcacctgatttctctaacttcgtcatttagtgtttgcctgattatcataaagatgatgataattgatggcaaaacaccaagagtaatatgaaaaagtcagctttcctgaatgtatgtaaagatcccaatgtcttatctgcacatggatgcccacatgcagcagggcccagagacgcttgctctggttcagtgggccaagactggcagtcctcatagtccacaaaggtgtgtacaagcagatcatcttgcctcaggttgttgcaaaagtgatgcttccctgttgttaaggtctttatagcttcctgggagctctcacctcttctagagatgcaggaagtttgcatgttgggtcacaagaaatcctaagactgacagaatcaaaagtcagactatgggcattctgtcccatcagagtcctggtctctgtggttaatttctgaaatgcattctatctgtgactgcttattgattttgaaggaaagggaagtttgtcaaaaagaaaagtcaggtttggttttaatggtctagaaagttagagaagaaggtgaaaaaatgtggagggcagtaacaatctctcttttttcttatgtgtttccatatagttgcctgggagagaatcaaaagaagcccaagaaaggaaacccagatgaggaaagaaaacggtaagaacagagcatctcagagtttttttgttttgttttgttttgttttttcattgagattacttccagagtctctgccccactagaactaacaccccttagggccgctataatagagttctttggtgattacctgcatgacttggcagcaggttagacattgactctgtctaaataagaaagacagggtattagccacgtgttttgtttctattgattatataatgtgagtgtagaaacataaagatagaataaaggatgtttggttttggttggttatatgtggtggccatatttcccaccttttccttacaagtagccagaataatctttggaaaacatgtctcattatgccttttccttgcccgagaccattcagtcattcttcattgcattcagaataaaatgcaaactcttcaccagggcctacagttccataaggattggattctgcatctctcccatctggttcctcactctctaccttcacccactatcttacatgcattctccttttatttgatgttctttaagccaccaaactcagcctcactttagggcatttctacaagctggtcttttactgcacaattaaaaaaaaattccatatttgcatttggactgattgataacgtctcctcctggagatgctggccctcatgcccttctctgaaagattatggaggaactttgcttctgcaccgcatggttttatggcactagaacctacttatatttgctgtggcctttatctgaacttgtaactctatatgtcgtttgagctctttatagtccacttccttcatagaccatacgcactttaacgtcacttctgtttcacttgctaatgtatatctgttgctcaacccttgcaagacactcaatggaaaaaagaaaaaaaatggagtggaaaaatggtagatatctagatgttgatatcttgcctcagcttagatgaacagaaacaccctgccttgttggttaactgtaggcttttcgtattcttgcactaagctcttttttaatcatttcatctcaatgtcttggtttctgtctctgagatggcttcttcttcttttccatggtatgaaggggcagaggattgaggagatgagccaggtatctgttggtgatgtgaaatgatgtttgcaggcatcagccccctcctaaatgtttgaacgacactttcctgcacaaaggagagagttggcttcatgagtcagccctcagggacagtggagttggctatgcctatcttgtgaccctttctcacgctcccccgactccccccactccccttatggtttgtagctggagaggagatagcaatgatttggtgatattattgaaccaaggttcttttatcagctgctgtgaatcagttctgtatagcgtcttttaaactagacttttaattcaggcattcccattaggcatttaacttacgcataaactagtcatctaaactaggcttttgtttcatcatgtctaaagtgagatctgcactagatgtcattctctaatatttttctgttaaaggaactgaagtgttaacattttcaaataccagcaagcctttattacaatcagacaataactaaatgtagataaattaaatgtcgttagggttttctcatgcaaggaaattttaggagcacgactcatggaattttcactagtcagcatggtgaggaagatctgaaccattttaccattctagtcaattgcagtcaaatatgtgttgcatgtgggctaagaagtcagtttcctttttggctaatttcacaggatgatgtctattgaataaagttggattttctacatcttcctgagtcaattttgattattggattcttatcagaatattattcatttaaacatatttacagaaaggacagtatgagctctttcaagtcacttaacttttaaaatgtaggcttatagaggtatagtacagtaaaattcacccttctcatatatacagtttgataagtttaggaaaaacatactcagtcatgtagtcaccacaatcaagatacagaatatttccaccaccctccctttcccttcaacccctggcaaccactgatctgatttctgttttgcattttttccaggatgtcatagtatcattgcttttatctttattgcattcttatttttgctttccttagttttttaaattgttgctattctaattgttttgaattcaaaactcaataattttgttctcaacttttcttgtttaggaatggaagcatatatgaatacaaactttccctctaaataatattttacctgtatcctatgtgtaattgaaggaaatactattattgtctaatattttgcaacttttaatttattcttggacctgagtagtttttaaatttcaaatattgttttatagtcttgaatataatttaaattttatttgttaccagtatctgtgtggtctgtgttatttctgctttatagattttattaaagtcttctttgtcctatatgttaactttgagacaagttacttacattctctaaattttgggttcttcatatgcaaaatagccttaaaatactacaattttagcttgtgtttatggaaaaagaaatcactgcctatttcatcagcacgatggctgtctggcaccaacactcaatacatactagctggtatctgtgcacatcattatgtgcctagattttgaaaatatattatgtaatattttgttcagagatcataattttgaaatttgtctgctagagaaacattattgtgtatttcagatattcactgtcattatttctcctgcttgttattagctgagagaaattaatctactggtttatttgagttacctttcatgttttctttttctttctttcatatggattctaaatagtttggtgtgtagcaattcatgacagtattaggtgtttgtcggttttaatctttatcatgccatcttctgtccagctttttttttctgaaatgacggccttgctaaaatcttcatcttccgcagtgtgagaaggtccctgtgacgggagatcaaggacacccagggacattgcaggcagcttcctctcggatagggaggatagagggaggtcctgtttcattagtattgcctagtctagttcccatatatctatctatattcatttactaaggctcttatagcgaagtaccatagactgggtggcttaaagaaccaaaattttctttctcacaattgcggagactggaagtctgagatcaacatgttggcagaggtgggctgttttgtgaagtctgtctttggcttgtagatgactgtcttatccctgagtcttcgtattgtcttccctctgtgttacgactgtgttcaaatgttctgttcttataaagacaccagtcatactgaaataaggcccaatcttatgaccttgttttaatttaattacctgtgttaagatcctatctccaaatacagtcacattctgaggttctggggattaggacttcaacatgtggattttaaggggacataatttagttcatgagagatgtcaagaaaatctaagaggattcttagaaatccaggaattcctgccactgtctggacatttccagcggccacagcatgcagaattgttccactgtatttaagagagagtggacaagcagtaggtgctgataatccacagcccggacttagataggtttggattttgtggctggagcctcggaacgacagataactgagtggctgaattccccattcaccagctgctttgttacataacttcacattttacaaagtccaaatgtggttgtgcagtaatgtttgctttatttctttcctaaagacctcgtaggttttagattatctcagtactaagacatttgagaacacatcttctttccttggagagtaatacagttcttggatcgtatctttctcctcacaacttagtgaacgtaattccactctgcagctgtggagctgagccaccttaagccgccttcctgatgacttggttttacatacattttccccatgaaagtttgaaaactcattatttgttccctacccccacccccaaacatgtattattttcttttatacatatgtctttattttaattttttttctcacctttcttgagctatgaatgaaaaacaaaaattgtacatattgaaggtacacaatatgatgttttgatatgtatatacggtgaagtgattaccactataagtacattaacaacttaatatatttattatctcagacagttaccattatttttgtgtgtgatgagaatgcttgagatccactcttttagcgaatttcaagcacacgttgtcactgactatagtcaccatatctcagtgttccatgccatttgttttttcccctgtgaagtcggttttcagatttaagtatttattttatgacttttctctcattctacttttgtttcatttgtttagattttttttatttttattttttatttttttgagaccaagtctcactgttgtcactggggctggagtacaatggcgtgatctcggctcactgcaacctccgcctcctgggttccagcaattctcccacctcagcctcccaagtagctgagactacaggtgcacaccatcatgcctggctaatatacaacttttttgtacagacagggttttgccatgttgcccagtctggtctcaaacttctgggctcaagtgatccatctgcctttgcctcccaaagtgctgtgattacaggcatgagccaccacacctggcctacttttaaaactgatagagcatacttgtacatatttggggggtacatgtgatattttgataaatgtatacaatgtgtaatgattaaatcagagtacttgtgatatccatctactcaaacaccaatcttttatttgtcttgggaacattacaattcttttcttccagctattttgaaatatacaataaattattattaactataattttcctcactgtgctatcaaatactaggagttatttgttctagctaactatatttttgtacccattagctaacttctcttgattctttcctctcccattaatgttgctttaatttaatataaaaatgttattctctataattgttttcctggtttaggccagtccattttccttctccatttattattgttaataactattaacaataataaacatgttatttttctgcttctaaaatattgtttctgcttcttttgttttgcttttgttacgcatttcatctttgtaactttgtgcttagtactctgaatgaaagtagatcatttgtgagataaaattgcgtgtatgcgtgtgtgtttaaggagggtgcagacgagaaacaagctatggctgtgactgaaccaaactgagggcggctcacccggcgccgcaaagccaaaaacatccacacggagggttgcagcaggaccaaggaggcgtctatttgcaggtcaccaagcaaggagaatggatccctcaggcttaagacctgtcctcttcaatggcttacaatcaagggtttttaaaggcaggggtaaatttcaggaaagcagaatttacaggcaaaattgtaaataaatacatggagattatagtttgtttggcctaaaaagctgagataccttgaagctgagggggaagggtgccttacgggtcataggtggaatgaaagattctttgatttgcaattgtttaaggaagcaaagctttgtctgagaatatggagccatgagtaaggaacgctaaggtctggctcctgggcatgactttctcaggctcctcaggaagaaatttagacaaagtatggcgctgggagttcagtcctcagcgcgcccgtgcctgaggtccgtgtgccagaggatgcatgtggtggaggtccaggtttcctcctgcttcccaggctccttatttactgctcagggctggctgggtgcctggaatttccctcgaagaaactcacgactttcctttatttccttgcttggcagtgccagacagacttccaagaggggtctctgctctgttgcaaaatccaggcagtgattgtggcatgtcgttttagaatgcttcctcacaaaatgtttttccctcagcccaggcacatctctctactgtgtacctagctgtccttgaggcaggcagctgattacaagttatatccttttttcatatttccccttaaatttaggagtctgactgacagagaaataaaaggtgatatgctggcaaccccatctcctccctaccgcctttgaatcctctttattgtgtaaattgtgtccctttaaaaataatctctatttctttcatcactggcccacacttattttttttttaatttatttttatttttatttttgagatggagactcgctctgtcaccaggctggagtgcagtgaaatgatctctgctcgctgcaacctctgcctcccgggttcaagcaattcccctgcctcagcctcccgagtagttgggactacaagtgcatgccaccgtacccagctcattttttttttttttttgtattttagtagagacggggtctcaccgtgttggccaggaaggtctcgatctcctaacctcgtgatctgcccgccttggcctcccaaagtgctgggatcacaggcataagccatcccacccggccaccacacttattaatgtctattactgtaaggttttagttagaattcgtaagaccctctcatttgtctttaaggatttatacaccctcatcaagaatagcagaaaaataaatttcaaaactttccattttctctcttgaattgtcctaaatttcattatattatatgtatgttttccatgcgtgtaataatatatgtagtctgataagctaataattctcttagcttcatgctatatggagctttgttttccacttttcattgtctagatttttgtggtttttcaaaaaaggctggagtaagcagccttttaattgtatttaatatttgcatggaaaatctaacaatggccttaggttaagggcaaccaaatgctttttttgaaaggcattttcagctttggagaacctggagtatctcatgttactatctctttccttgtaggcaggaaatgactacatttgaaagaaaacttcaagatcaagataagaaaagtaagtcatggctgtataatatttttcatagtagggaagtgcaaatttaagcatccaattagcagacactcttgagcctattgtaataacagattggagaagaggctgcttggagttcttactctttcataaaactgatcacatcattcttggtattaaagtaatatttgtatattattttttgagtgacatttaagaaacttctgtggaaagaagttaaccaaaattctactgtttttaatttgtatattggtgttctaaaatagggcctttgaatattagcaggcgataagaagtgtatttttttttttgagatggagtcccaccctatcgcccaggctggagtgcagtgtcacaatctcggctcactgtaaccccccgccttccgggttcaagtgattttcctgcctcagcctcctgagtagcagggattacagggagacaccaccacacccagctaatctttgtatttttagtagagacagggtttcaccatgttggccaggctggtttcaaactcctgacctcgtgatccacctgcctcagcctccgaaagtgctgggattacaggcgtgagccaccatgcccggcccctaaaaagtgtattattttgttctcaagaagttgaaagaagctggtggtgcactcctgtagtcccagctacttgggaggctgaagtagaaggattccttgaggccagaaattaagagtccagcctgagcaatgtagcaagagcctgtcttaaaaaaaaaaaaaaaaaagaatttgctctgtttgccatagtatctaggtatagtaatcatgtaattactcaaaatcgacagttatgaataacagggctcagcccctgtggacaagtatacctaaaggaaactctctgtttatttttacccctaactttattgaggtataactgacaaataaaaatggcctatattcaaggtgtgcaatgtgatgatttgatatatgtatacattgtgtaatgattactacatcaaattaatatatccatcactatacatagctaccatcttgtatgaatgtggggacataagggcacttgagatctattcccttagcaaatttcaaatgaagaatactacgttgctaactaacaagcaatggggatggatttcctattcaatccgtggtgctgggttaactggctagccatatggagaggatagaaactggaccccttccttacgccatatacaaaaattaactcaagatggattaaagacccaaacgtaaaacccaaaattataaaaaccctgtaaaacaacctaggcaataccattcagaacataggaatgagcaaatatttcatgatctagacatcaaaagcaattgtaagaaaagcagaaatggacaaatgagatctaattaaactaaagtatttctgcacagcaaaaataactaacaagagtgaacagacggctgggcccagtggctcatgcctgtaatcccagcactttgggaggccgaggtgggcagatcacgaggtcaggagattgagaccatcctggctaacacggtgaaaccccgtctctactaaaaatgcaaaaattagctgggcatggtggcatgtgcctgtagtcccagctacttgggaggctgaggcaggagaatcgcttgaacccaggaggcggaggttgcagtgagccgagatagcaccattgcactccagtctgggcgacagagcgagaatctgtctaaaaaaaaaaaaaaaattggtagtcaatttcagattcacacgtatgtaaattgcttcagcattcacagatggaatcaacatgaatctgcatatttgtgtgtaacttgaaatagttactcgtgttatttctgtacctatctctatagcaagtgttcattttaaagaattgtatgattttcctgtgatagttacataaaatttatatcttaaatttgcagctataatcattctttctttatgcttatcatattgcattgacatagcacatttatgaacattttattaccaaattttgaaatccatcttattcagtacattaatgtgctttatttacagaaagaacatactattgatgctatctcagaacacatgttctttcttgattttttcactcagtcttgagaacttcagttataagatggggcaatgtcatgtcagatgtttagataataggcctctgcagttttatgacttctacattctgtttttttcaccttttccttcaatctgtgatggggcaaaagtctcacagtgctttcctttctttcttttttttttttttttaattctccaggccaagaagtttcatccacttctaatcaggtaagtagaaaacaaaaagcaagacaaaagaaaaacacaaacttttattatgtttgtctgataaatgccaaaatacagatgatttattcaagagtagcatctgtcttcctttatttgtaatttctaaatgtacttttagaaatcattcatattttaaataatttatatggcaattgtaatgcagaaatgaaaggaaataaaaaaccaaaaagtatttcaactgatcgagatgagtagcaagttcttaccgttttggcctcaattctgctgaagtctaattttatttatttatttattttttgagacagagtcacactctgtcatccaggctggggtgcagtggcacgatctcggctcactgcaacctccacctcctgggttcaagtgattctggtgcctcagcctcccaggtagctggctttacaggtgtgcaccaccacacctggctaattttttatttttagtagagacagggtttcactatgttggccaggctagtctcgaactcctggcctcaagtgaatccactggcctcagcctcccaaagtgcaggggtaacaggcattagtcactgtgtccagcctattattttaattttcaaagctattataacaaaaacagatgaaattaagtaaatttatacttaaaaactgaccaccataaaacattaattatttttagctttccacattccctttcaatccttatatccaggaattagcatttgcattgacaagtatggtggaaactataacatatggaaaaaagtttattccttttgatactacctcataaaaattttgttgatttaattagtatatattaatgtttttattttttctttccttcactgtctatgcaattgaaaatgtgcataaactcaattttttcttagtattttatcttataaaaattataatgaataattacttattcattacttactgaggtctgattgttgcaaacattgcatctcagtgtgtgtgaacgaaagtatagaagtgcttttccctggatagttagaggcataatagcatccttcttttctcttttattattcaagtaaaattaaagcacaattagtagaagcttggagtgcagtttatgctgctataatgaggtctctaagacaccagggcttggagcaagggcttttttttttctagaaacatttcttacattatatatattttattatttatttatttatttatttttactttaagttctgggatacatgtgctgaatgggcaggtctgttacataggaatacatgtgccacggtgctttgctgaacctatcagcccttcatctagggtttaaaccccccatgcattaggtatttgttctaatgctctccctccccttgccccccacaccccaacaggcccgggtgtgtgatgttcccctccctgtgcccatgtgttctcattgttcaacttccacttatgagtgggaacatgcagtgtgtggttttctgttcctgtgttagtttgctgagaatgatggtttccagcttcatccatgtccctgcaaagaccataaacttattcttttttatggctgcatagtattccatgatgtatttgtggcacattttctttatccagtctaacattgatgggcagttgagttggttccaagtctttgctattgtgaatagtgctgcaataaaaatgcaagtgcatgtgtctttatagtagaacgatttataatcctttgggtatatacccagtaatgggattgctgggtcaagtggtatttctagttctagatccttgaggaattgccacactgtcttcctcaatggttgaactagtttatactcccaccaacagtgtaaaagcgttcctatttctccacatcctctccagcatctgttgtttcctgatttttaatgatcaccattctaactggcatgagatggtatctcattgtggttttgattttcatttctctaatgactggtgatgattagcttttttttcttatgttttttggctgcataaatgtcttcttttgagaagtgtctgttcatatccttcacccactttttgatggggttgtttttttcttgtaaatttgtttaagttctttgtagattctggatattagctctttgtcagatggatagattgcaaaatttttctcccattctgtagattgcctgttcactctgatgatagttccttttgccatgcagaagccctttagtttaatttgatcccatttgtcaattttggcttctgttgcaattgcttttggtgttttagtcaagaagtctttgcccatgcctatgtcctgaatggtattgcccaagttttcttctagggtttttatggttttaggtcctacatttaaatctttaatccaacttgagttaatttttgtataaggtgtaaggaaggggtccagtttcagttttctgcatatggctagccagttttcctaacatcatttattaaatagtgaatcatttccccattgcttgcttttctcaggtttgtcaaagatcagatggttgtagctgtgtggtgtcatttctgaggcctctgttctgttccattggtctatatatctgttttggtagcagtaccatgctgttttggttactgtagccttgtagtatagtttgaagtcaggtagcgtgatgcctccagctttgttctttttgcttaggattgtcttggctatatgggcacttttttgtttccatatgaaatttaaagaagctttttttctaattatgtgaagaaagacaatggtagcttgatgggaatagcattgaatctataaattactttgggcagtatggccattttcacaatattgattcttcctatccatgagcatggagtgtttttccatttgtttgtgtcctcttttatttccttgagcagtggtttttagtttccttgaagaggtgctttacgtcccttgtaagttgtattcctaggtattttattctctttgtattgtgaatacaaagagaataaaacacaatttgcaattgtgaatgggagtccactcatgatttggctctctttgtctgttattggtgtagaggaatgcttgtgaattttgcacattgattttgtatcctgagactttgctgaagttgcttattaggttaaggagtttttgggctgagacgatgtgattttctaaacatacaatcacgtcatctgcaaacagagacaatgtgactttttctcttcctatttgaataccctttatttctttctcttgcctgattgccctggtcagaactcccaatactatgttgaataggagtggagagagagggcatacttttcttgtgctggttttcaaagggaatgcttccaacttttgcccattcagtatgatgttgactgtaggtttgccataaatagctcttattattttgagataggtttgatcagtacctagtttattgagtgttcttagcatgaaggggtgttaaattttatcgaaggccttttctgcatctattgagatattcatgtggtttttgtcattggttctttctgtttaatagattacgtttattgatttgtgtatgttgaaccagtcttgcatcccagggatggagccgacttgatcgtggtggatatgctttttaatgtgctgctggatttggttttccagtgttttattgaggatgttcgcattgatgttcatcagggatattggcctgaaattttctatttttgttttgtctctggcaagttttcatatcagggtgatgctggcctcataaaatgagttagggaggagtccctattcttctattgtttggaatagtttgagaaggaatggtaccagctcctctttgtatctctggtagaattcagctgtgaatccatctagtcatgggctttttttggttggtaggctaattaattactgcttcagtttcagaacttgttattggtccattcagggattcaacttcttcctggtttagtcttggaaggtgtgtgtgtccaggaatttatccatttcttctagattttctagtttatttgtgtagaaatgtttatagtattctctgatggtagtttgtatttctgtggaatcagtggtagtctcccctctattattttttagtgtgtctatttgattcttctgtctttcttcattattagtctggctagtggtctatctgttttgttaatcttttcaaaaaaaccagctcctggatttattgattttttgaagggtttttcatgtctctatctccttcagttctgctctgatcttagttatttcttgtcttctgctagcttttgaatttgtttgctgttgcttctctagttttttaaattgtgatgttagggtattgattttagatctttcccgctttcttctgtttgcatttagtgctataaatttccctctaaacactgctttagctgtgtcccagaggttctggtttgttgtgtctttgttctcattggtttcaaagaacatctttatttctgcctacattttattatttacccagtagtcattcaggagcaggttgttcagtttccatgtagttttgcggttttgagtgagtttcttaatcctgagttctaatttgatttgcactgtggtctgagagactttttgttatgatttctgttcttttgcatttgctgaggagtgttttacttccaaatatgtggttgattttaggataagtgctatttcgtgctgagaagaatatatattttgttgatttggggtggagagatctgtagatgtttatttggtccacttggtccagagctgagttcaagtcctgaatatccttgttaatcttctgtctcgttgatctgtctaatattgacagtggggtgttaaaatctcccactattgttgtgttggagtctgagtctctttttaggtctctaaagacttgctttatgaatctgggtgctcctgtattcggtgcatatatatttaggatagttagctcttcttgttgcattaatccctttaccgttatgtaatggccttctttgtctcttttgatctttgttggtttaaagtctgttttatcagattgcaccacctgctcttttttgctttccatttgcttcgtaaatcttcctccatccctttattttgagtgtatgtgtgtctctgcatgtgagatgggtctcctgaatacagcacactgatggatcttgaatctttatccaatttgccagtctgtgtcttttaattgggccatttagcccatttacatttaagtttaatattgttatgtgtgaatttgatcctgtccttatgatgctagctggttattttgctcattagttgagcagtttcttcatagtgtcaatggactttacattttggtttgtttttgcagtgggtggtactggtttttcctttgtatatttagtgcttccttcaggagttcttgtaaggcaggcctcatggtgacaaaatccctcagtatttccttctctgtaaaggattttatttctccttcacttatgaagcttagtttagctagatatgaaattctgggttgaaaattcttgtctttaagaatgttgaatattggcccccactctcttctggcttgtagggtttctgcagagagatccgccattagtctgatgggcttccctttgtgggtaacccaacctttctttctggttgtccttaacattttttccttcatttcaacgtcggtgaatctgatgattatgtgtcttggggttgctcttctcaggagtatctttgtgatgttctctgtactttctgaattacaatgttggcctgtcttgccaggttggggaaattctcctggataatatcctgaagtgtgttttccaacttgattccattctccccgtcactttcaggtacaccaatcaaatgtaggtttgatctttgttcacatagtcccatatttcttggaggctttgtttgttccttttcatttttttttctctaacattgtcttcatgctttatttcattaagttgatcttctatgtctgacatcctttcttctgcccgatcaatttggctattgatacttgtgtatgcttcacgaagttttcgtgctatgtttttcagctccatcaggtcatttatgtttttctctaatctagttattctagttagcaattcctgtaaccttttttcaaggttcttagcttccttgcattggcttggaacatgctcctttagatcggaagagtttattacccaccttctgaagcccacctctgtcaatttgacatactcattttccgtccagttttgttcccttgctggcgaggagttgtgatcttttggaggagaagaggcattctggtatttggaattttcagcctttttgagctgctttttcttcatctttgtggatttatctacctttggtctttgctcttggtgacctttgtatggagtttttgcgtggttgtcctttttgttgatgttgacgctattgctttctgtttgttagttttccttctaacaaccaggcccgtattctgcaggtctgctggagtttgctggggatccactccagattctgtttgcatgtgtattaccagtggagactgcagaacagcaaagattgctgcctactccttcctctggaagctttgtcccagcagggcacctgccagatgccagctggagctctcttgtatgaggtgtctgtcgatccctgttgggaggtgtttccttgtcaggaggcatgagggtcagcgacccacttgaggaggccatctttcccttagcagtgcttgagcactgtgctgggagatctgctgctctcttcagagccaacaggtaggcaggaatgtttaagtccgttgaagctgcacccacagcctttccttctgtaagcccctgactggggctgctgcctttctttcagagatgccctgcacagagaggagaaatatagagaggcagtctggccacagtggctttgtggtgttggagtgggctcagtccagcccaaattcccctgcggctttgtttacactgtgaggggaaaactgcctactcaagcctcagtaatggcagatgccccttcccccaccaagctcgaatgtcccaggtcgacttcagactgctgtgctggcagcaagaatttcaagccagaggatcttagcttgctgggctccatggtggtgggacccactgagcaagaccacttggctccctggcttcagccccttttccaggggagtaaacagttctttctcattggtgttccaggcaccactgaggtatgaaaaaaactcctgcagctagcttggtgtctgctcaaatggccactcagttttgtgcttgaaacccagttttatgcttgaaacccagggcccttgtggtgtaggcacccaaaggaatctcctggtctgtgggttgcaaagaccgtgggaaaagtgtagtgtctgggctggatagcactgtccctcaaggtatggtccttcatggcttcccttggctaagggagggagttccccaatcccttgcacttcctgtgtgaggtgatgccccaccctgcttctgttcaccctctgtgggctacactcactgtctaaccagtcccaatgagatgaactgggtacctcagttggaaatgcagaaatcacccgccttctctattggtcttgctgggagctgcagactggagctgttcctattcagctttgttctttttgcttaggattgtcttggctaaacaggctcttttttggttccatatggaatttaaagtagttttttctagttctgcgaagaaagtcggggagcttgatggaaatagcattgaatctataaattactttgggcagtatttccatttttatgatattgcttcttcctatccttgaacatggaatatttttccatttgtttgtttcctctcttatttccttgagcagtggtttttaattctccttgaagaggtccttcacttcccttgtaagttgcattcctaggtattttattctctttgtagcaattgtaaatgggagttcactcatgatttggctctctgcttgtctattattggtgtacaggaatgcttgggttttggataccttaagtgtaagagcaccatcaggtgtataaagaagaagggaaggtagtacactgagttcaatttatgaatgaccgtggatccttgatttcttttctctttgtgcttggcaggaaaacgagaatggcagtggttctgaagaagtgtgctacactgtcattaatcacatcccccatcagagatcctccctgagctccaatgatgatggctatgagaacattgactccctcacaaggaaagtgagacagtttagagaaaggtcagagacagaatatgcccttcttaggacttctgttagtaggccttgttcctgcacccatgagcatgattatgaagttgtgtttccacactaaaatcctcaagctgctttatcaccttccagcaatgaagacaatgcagaatagcagactctggcgaagttgttcaccctgagcagtgcatgaaacattcctttctggctaaagtttagaaatattatcttattatatatccttaggcaactctgatatgtggcatctctgtggcttaggtgaaatcatagaaattgacacaatgacctaaaatattctatgtgtttttgcttgtaaagtttgaggacatggaggtgataaaaaaaactttcttaggacaataatgtaaaatgaaaataaatttctaatccccctgactaactgaatggaccctcttctaggccaaagagacctcagatgaacctgaaagactgaattctggccatgataggaagggaggtgagacacaccttgttataccccttcccttttggagtttatgcacaagtgaccaggatgagtcataagactgatgaaatagactgattgtggcaataagagtcccaattccaacctgactctggtgtagatcacacactgtctgagggattccatctatgagactttgtctacataacagagaccttggtttccacaacccctttattttagctaaagcattcttttctactgacttcttaagtctttagacaaagcttaactctttcaaccaattgccaatcagacaaactttgaatctacctatgacctgtaagctctctcctgcttcaagatcttgcctctttaagctgaaccgatgtgcactttccatttaatgatttatgtctttgcttgtaactcctgtctccctaaaatgtataaaagtaaacggtgacctgaccacctcaggcacactttctcaggacctcctgagagtgtatcccaggccatggtaagtcatgttggctcagaatcaacctctttaaatattttacagaatttgggttttggttaccaataagtctccacaaatatatgtccaagaatcttcaattccaagcctgctcaccaaatttcaaatgccaacatctccccatccaattacctatttcatctttgaggtgtaatctactcaataaactgtgtaagaccagtgaccagaccctttgctaacctgacatttacttcaatttttctttttctatgtactggatatttttgcatataaacttgcagtaatagttcaaaaattaatagtttttgacattggcttttctgagaagagaaattgaaagtgtcacaaaataaaaaaagatgaaatgaagcatatataattgtcaattttttcaattttctagccaacagagaatcgaaggattctgttcaaatattagtaaaaattgaaaataaacttgtgcttatattttgtttgcaacacactagttaatttaacctgtgactagttatctctaccgaaggtggatgtgtagtttctggttttaaaattcaagcaaactggaaaataatccatctaattatgctttctttcccaagaagttttttaatgatatgccagcttcctaatttggagacaaaagccttaattgacaatgcattcattatatatttttttgtatagttacagtatacgagttgagtatcccttagatgagatgcttgggaccagaagtgttttggatttcagatttatttttggattttggaatatttccatacatataatgagagagttggaaaatgggattcaagtctaatcataaaattcacttatgtttgatatacaccttatctgaatagcctgaaggtaattttatacaatattttaaataattttatgcctgaaacagagtttgcgcacattggaccatcagaaagcagaagtgtcactatttcaagtcagtgctcaaaaagtttcagatgttaagctggtgatgcagttcatgccagtgatccgagtactttgggaagccaagacaggtggatctcttgagcccaggagtttgaggccagactgcacaacacagtgagacctcgtttctacaaataattaaaaaattagccaggtgtggtggtgcacacctgtagtcccaggtactcaggaggctgaggtagtaggattgtttgagactgggaggttgaggctgaactgagccaggatcttgccaccacattccagcttgggcaacagagtgagaccctgtctcaaaaaaaaaaaaagtttcagattttggagcatttcagatcttcagattagggattttcaacctgtactgaccttttagtcattgacaagcattaatcaataggtggactccagataactcatttgctgtatacacattttgcctctctattcaacgaattcttatgccctcttgtggtgattttaatgtgcggaagggaaacaatagaaattttgcaattctagaaaagtcattctgtcaaaatatgtcagtcctgtagatattagccaattttaggaaaatgacaaaattttttacttttcgtctgcctttgtagctgttttatgatataaataccttatttgtaataaaattaattttaatttgagtaacaatctggaattatcagagaaggggcaagcaataggttaataaacagtattgattggtagaaggaacgttgaaatccaagagcatcaatgtcttctggtggttcaccataagccacagcagatgtcttaatctttccgagatctagtttttcagcaaagcaggatttaagaaatgtaactatcttatgtggttatgaagaacaatagaatcattgctgtataagtgctttttaacctgtaaattttgtgaagcttatcttttatgcatataaatatttgaacattttacattgtttatatttttaatcagttttactcaagtgtgattatatacaagaaaatgtaaccactgtaagggtagagttataagaattttgtcaaatgtattcacccatgtagtcacctccttatgaagagacagaacacgtacatcctcccagaaagttccacagtgctccttttccctgagtttcaccagtcctggcaaccaatgatctgcttcgtataattataactgttctagatatttgtagcaatgtaccctttccatatttattttgtgtgtgtaaggcttcttttagtcattataatatttttgagattcatctatgtttaatgttctatcagtagttgtacatcttacttgtctcagcatatcaccatatagatatactataatttgttaatctaatcactgatggatatgtaggatatttaagtttttgacattatgaataaagtggctataaatgaataaagcgactacaaatttgaatatctaggtgtgttagtttactggtgctaccataacaaaggaccacagagtgagtggcttaaataataaacatttattttctcacaattctgaaggttagaagtccaaggtcaaggtgttggcagagcgggtcttttaagggaaaaagcctaaaaactttgagttggtttctctatgggaaaatcttttcaatgcatctctcctagcttctgggggtatgctgacaatctctggcatttccacatttattgataaaatggatacatgccaagggatgagaaatacatgtgacaataatcaggggtcttctacctcagtggaatttctagggtcaagtggtgtaaagcatgttgaga

SEQ ID NO: 224 - DNA, 21462 bp, Homo sapiens
  source 1..21462: mol_type = genomic DNA
ttttcatgcaattcaatcagattgtgtttttcctaacacctgagttaaggaataaactaatagaggaaagaaagaaaaataactttagacatgaaaatatttgttcagaaaagggaaatctctggattgggaacatattaaagtacaagtctggtagtcctcagggcattcgtgagcttgggcaaattgggtgccaggtataaaaagagtggtgcaaaaatgcaaagaattctcaacgatttcaaaagcagcttccacccagaaaagacagtctcttttccactttcccaggtgattacatcctctcaaaactcagaagtcaaaattgctttgttaaaaagctccatttgggtaaataaagtttctgcaaaatgacctggaaactcaaacaatcaccgtgtccacgggaaagtgtttcttagttctaagggtccacttgcaaccagttttttgaaacatgacctatttgtaaattgactattgtgttgataaccaaaactcataaaaatcacacccagggcagtcccagcaaagagtagagagccaaagcccagtaatggcttaaactgtaagtttactgggccaagcccaaagctaagaattcaaggagttttgcaacccatacccatttttcagctgcccttatgccagcagttacaattcacacactccaaaacttcaggcaatgctgctggcctctgtaccatttcctcctccgccagctgaccaaccctaaggattgtagctaactgcacattccccacgtcaatatttagggaccaatcagagagcaggtagatgatctggggacagaattgtacagtggttaactcctcaggctctagagtctgaatgaactaattttaaatcctaactacaattccctggctggatgcccacaggcaggttacttaaattctctgcaccttggtttcctcatttgtaaaatggggattataataatatctacctctgagggttttaaatgagattctacatgtgtagaataacatcatgcctgatagagtgagtgctcacattcacacatgagttccccaattcacagcaagcacagaaaaacatttgtatcttctgcttccagtatgccacaaaggtaatgagtaattacactgacatcttggttgacttaggtaaccactttcttacctcaacattactgctttgtttttttcaacattaaagcaactaagaaataatccaatttctatttggattcctgaagtgctgggatgagggacaggcttataaacactggtctaataggtgacaaggatttggctttattctagtaataaaaatgtcatgaaaaaggagttattgaagagttatgaagaaaaagtgtaatgctctaaatgatagatttttaaaatcatcagtttgttttcaggcattgagtcccaaactggaacaaactacctctgacaataattctgtgagaaaaggatttttctaaatcgatccatataaaccaggctgagttattaaggagaaaaatgcgtttaataatatagcattcgattgcatatcatccaggaaaggtgtactgtaaaaaatgttttgattattcattgacctctggtaactttagcgttgtaaatacttgtattatatgaggtagacagtttaaaaaaaactctccattagacagacttaaaattttgtaataatatttaagaaaatggtaacattatgaaaaaatgaaatatctgattaatgcttaactttgtacaactcgaatataaactttaaaaatattagaaattataacatttgagtgcatataacgttttgtacattaggatgaattgcatgctgtccatttcctctttgcactttcagtcaccttaaataaacaaatatatacagccttaacagaacaacagtgcatccaaagcaaatgtgcattttaaattatttctcctggccaagtctttttttcacttagcatttttatattagcatttcttatcatccccaccctttctttgacagtttgtagttctctgaaccaaacaagcaacaggtttagattggaagagagcaaaatcacttaggaaaaactaaaactttttaaaaggctggtacaaattccattgattaaacaattttatagtcaaagatgaggaggaagctaactcttcaaagggcctactcatgggcaatgtttgaaaacaatactggtgcaggctgggggaaagttcatgtttttgactatctgggaatgggtatttcaatttcactgtgctctctccagcttcctcccagaagacgaattccacccctgtctccttcctcactgcctgttccccatctcccaccccaagctcaatgtaacacttggctcttttcacagtttctcattactaagttttaaaaacattgcctaactgataattacaatctgaaccaattcttttgggggagccctgggctattgctggctggtaatctttcaggaatgtcaaagagaggggagggaactcagattttaaagaaacttcagagacagggacttgtgtcccctttcatccctcccttccccactcctggctcctggcctgtcccttgatccccatcctccctgaggcccaccatcttccctcctgatgggactccttctacttcttggttccttttccctcctttgtagctcttacgttaattgttttgttccccactcctgcccatttttttgaactggaaaatcaccttccccttagaagtgcatgtctgaattttggcaaattctgttgaaagaaatcaattagaatcagaaagggcatttgggtgggctacctccagcctgggctaatgcacctccgtgtcagccccagtcagaggcaggccttgtggtttctcattatccttcaaggggttccatttggactaattcttgtcattccatccataccagctccccttgcccccaccagaaaaagcaacaatgaaggcagagacctgggccctcaggagtgagatgaaggttgccagttcctggtaccgaaagaggccagggcagagctggtaaactcacagagtacacaaatgggtgagaggggcacccgtgggcccacctctctcaaagctcttctataggcaggaccattcctgacttaactattctttttgccaatttccctatctaacactttctgtgtgggagggcacaagacatgggctatgacatggccagagaccccaccttctttacacatgtaaaaaccaaccaaatcaagatgcgtcaacggtgattcttcctcccacattgtttccctttttaaactgttattttttcaatccatggagcagttgagaaacgggtatgcatctctcctcccctccccttctatcaaagcctgtaagacacataaggaaatccaaagccacagtaatagagagagagagagagagagagagagagagagagagagagagagagaaaacagaacaaaagaaatcctccttggcttgtttttccagggtggccaggcaaggtgtgaaaatccatatttccctctgggctggcaggtagaagttactgggaaggctgcgctcccttctctcccaccggctctcacatccaggctgttccctcaccctcagcctcccccagcgccagcttcctcctccgcctctctgcagccaggcctcccctgcaaggcggaccttggcccaccttggttccgggccaaggcggcgggaaaggcaccgctacctgcagccgcacgactccaccaccatgtcctcgtactgcttgtagaccacattattgcccgcgtcgatgtatagaatgctgatgggagtcaatttggtgggcacgcagcagctgggcggggtggagccggggtccatggagttcatcagcgtctggatgatggcgtggttggtgggctccaggtgcgagcgcagcgggaagtcgcatacaccctcgcagtgataggcctcgtactccaggggcgcgataatccagtcgtcccagcccagctccttgaagttcacgtgcaggggcttcttgctgcagcgtagcctggacttcttgccgtgccgcttgccatggcgactggcgaaggccgtgcgccgccgccggcggccgggcgagggcagccaaggcctggcatccggggcgcccgacggcggcggccacgacccctcggcgcccgcgcccgggcccgcagcctcggccgagcccagctgctcgcgcatctctgcgaacaggttcttgcgctgggatctggtgaataccaccagcagggcccgctcctggggaggccgcaccctccggccgaagcccagactccgcaggtccgggggcggcggttgctggggtccccgcgcgcgcgcctcggcctccccggcgtccagctcgccccatgcggcccgcagctccaagcacagctgcttccagggctggtggcgcaggccctgccacacgtcgaagacttcccagccggccggcggcgccccctgcgggtccagggtccgcgcgtccagcagtaggggcgaaaggcaagggaagagctgcacgtggagcggcccggctggtggcccccagggcgctgagggcgcctggcgaaagagccgcagctccgcgcccaccagctcttctttgtctgagagcatggacacatcaaacaaatacttctgtctccggagaggagtgtgcgagagatcgtctgcgagataaaaaataattacagtcagtttcacttaagggggagatcagcccggtgctcttcggccgccccgggaggaaaagggcggggagtgggggcaggtcggccgggcagtccagcttgcccggcccagggcctgaccaccccggctccccatctggctggtgcatggcgcggggaagggggcgcgccaggacgggccccctccttcgcgtcagctccggactctcagggcggaagtcggtggctgctggcgaggcggcggcggcggcctaccgggttttccccccaaaaggcttcgtaaccactaatgtgccctttgtggtctcaagcctgggccgcgtttcccctagacctcctctgggctgggctggctcgttctcgttgacgtctcaaatgtcacctcctccaagtagccacccctgagcaccctgatctaaggtagcctctccaggtctctatcacaggactggcttgattatcttcccagtacttaggattatctacaattaccttgtttacttttatctccttagtagtctgcctttcccagtaacactctgtctgcctccaccaacccacgggagctaggccgatgtcattgtccaccttgctcccctcagtgcctagggcggttcctgacctggagcacacgccggtcaggtaagtgggaaacttctacgacagcgaatcttaatctggcccactaaaatgtcctggagaactgaaaaactgccaggaccagggcttgattcagcctattgaatcactgtctaaggacaggactggccatggggtttttgtttattgtttgcttttttttttttttaactccaagatgacttaaaggtgcagttctagtttagactcactagtctggggtaacattgctgcccatcaggcggttttggtgggtccaacacagtgcaggcagaatgaagagctggtgagagatttatttatttattcaccaatcattaaacaacaaacaaaagagcaatgaagtttcagaagtattgggggcagggggtgacaaatgaacaaacacacacaccttgcatctgtccattgagaacatcctgcagtcaatgagaaaaatatatacctggaaggcagaaaactggaaggcagaaaacctcagccagggacaattagatacacacacacacacacacacacacacagagagagagagagagagatagagagactttcccatctctcctcccactcccaatctaaaattctctcactttgcaactattcctgaagataaaagttttggtcataagtgagaaaaagaaatttaggacaggtgaggtaggggagtgtaacaggcttttaaaatccaaggcaaattcttcagaaccaaggcaaaaccggacttcttttttgacacatttgtgcatgaagccaactccacttcaatgtgcaaggcggaaagctaaccagattttcctgggctgccttcccataaaatatttacaacccagcaaatacaaaaatccccaaagcccccagccttccccagaagctagtaaagtttgggtcgatttcaatagtaaaagtgtcactgggcccagcatccaaccctctctaccagtccagatgtagcccgggggcactggctctggagcctctgccacacccagtttgtactcggggctgaccgtagcactggctggttcactcttacgcacatgccccaacctgagatggggtgtgggaagggttagagaggtgaaaagggaaaagctgctgcaggcagttgatttatggaagccaagaccttcaaacagaccagggtcacattaaaatcaggcggaattcagcacactttcttctccttcaaagaaacctgtgtctgacaatgctcagcctccacccagatctctggacgtactgccttaggcttggcttcctgcctctctccccaaactagggatgagatgagagcaacaaatctaaggcacttgctgcactagctaaatgtggttaggaataacatatttccaatctatatccacctgcacagaacagttctgaaaggtaattacttgtattattcccattttacagatgagaaaaccaaggattggagaaattaaggtattgccaaaagtcagacagccagaaagtggtgaggctaagagccatacttatgtctatttaattcagagttggagcatttagcccctaaaccccactgcctctccactgtagtccaggtactggagtctaaaagtaaccagaagtggccagtgtataagaaaaggggaaaagagtccaaattatttgcagggcttgctaggaataaaatctaggctcccttaggaaatcatttccatctttgcttacacaactcttgagatggtttgccactggctggagtgcattaggcaggtgtaaagaattatgatttacttctctctcatgcaatatgggggaaatcagcctgcttttgtttttactcttttaaaaaaaatgtgtgggctaataaatgattaatttgcacagctgagttaaaactgaggcaagcatctgtagagaaagatctcctactgattctgcagccttaggatttctgatgatctttccagcaagaccagcccacccctaccctttccacgtttcagtgcaagaatgcaaatgggacttcagcttcttctctcttctctttccacactagctccatcacctacttcaaggggcctcacctgtgagcatgtggccatcccagctgacagcttaaagctgtgcacagtttcacaggtgcacacatcagtggttcgatctacctttgggggaactgaatggatgaagaggctgtccagaccctgcaagtgagctcagggatatttgggcaagaattatatggcccaggtatctggagcttggtctggaatagtgactctcaaagccactaaatctgcagtggtctttaaatctgcatcatcagcatcacataggcgcttgctagaaatgcaaattctctctcgctctagaggcttgtggtagggtctagaatttgtatttctagtaagctcccagatgatgctgattctgctggtccaagaaattactctaagaaccactgatctaactgggggttgtcctctaggttctttgaattcaccactgagtaggggggagcaccaaacaaggtgctgcaaagcacagggctcagggcagcatctaaggcagtactcaccaggaccaagtcaattctacctctcccagcccattcgtggcccccaaagccacccccatttttttatcctttcagccacaagttctcttggttctgggtctccagaacctctaacccctaaacagaaggtccaagaaggtggctcctctgtgcagctcccctgcagaccacattccctacctgtctaaacctgcatcacagaaatagctcagaggaggcatccaacctggggagtgaatacaacaccatgcactgttaccctgaagacactttgcctgctgcctgctgacctggcatcacagagcctggctcagctgccatgagccatctgtgggcaaaaagccagcccttcatactccgttccaaaagcctcctctcccattaagtcttgtataaatgaagactgatgtcatcaaatgatcctctctcccacccctttgactaaaaaaacatgcacttgtcacttgaaaatctgtggcactttcccacatcctggaagtgaatcctatgctttgggcccttaaattgaaattgaccagaaatacatggtgggagttttttatttcccttttactttgcatcaacctggtttgttacagcttattcacacctctgttaacggtgtttgctgaacattagacatataaacatttccagttacaattgctggattagggcttatcttcgtttcctggcagctacgtagagaaaggagggtgaagagagaaaaataagaaggaaggaacaaaccgtggcatgttagaagatactccttcataatggtcaacgagttggtaaaaggctgaaagcacctcaaacatatatttctggtgtagaatttaggaaaaatttaaaagaggggagatgttggtcaaagggtacaaattttcagttagggtgaatataaggtaaaaaataaaattttaactaaaaaaagaaaccaagagaaggaatggtacctatttgcaaagtaattaccattgcacccattttaaatgagaaaactggcctagaaaggaaaagggcatctgtccacggtcacagtacgtggctggagaaagttggagtggcaaactccagagcggaaaggaaaagatgcccgcaacgccaaaggccagacgcccggggaacctgagccccaagagggcggcatgagggagggacacgtagctgcaggactctgtgcgcttgcccactccagcctgcccactccagccccagagccttctgctgggggctacttccttgggctagcctgtagagggtttccaaaaaccagaaacttcctttggttggaggtgggaagggcctggcattgcattttcccaagacatctctgagatatatactcagcttgaggtcccttttgaaagtcctagttggattttgtcactcgcctggctgtgcacccacggctccaacttcccggacttgcaggattcttggtacggctgactttgggctccacgagattcctccgcgcgcacctggctcacatctctgagtacgcagtgaccctggatagctactggccaggcgtcccgccacgcctcccagccatgttctccggtggcacaggccccgcgactaggccactgtccagaaagtcgagaagatagtggactttcccatccccaatccccaggcagggagaatcacccatctttgcaagagaaactctaggcgcctttcccttaccccctcattttagagccagcagcagcattgagcgcttgtagggcaccacctttgtgctaggcacgtgctcagagctttgatggcctctctcactgaattttcacagcgaacgtctaaggtcaggcctactgtgatactcacttatagatgaagaaactaaagctctaagaggtatcttgcccattgtcttgaaactagcaagggacagatgttgaaggtcctaattccaagtgccctgaccccagtcctgcagcgcaagagacaggtgttgaaggtcctaattccaagtactctgaccccagtcctgcagccatgctgctctaccagggtcctgttttggcagggggccaggaaataggacatagcttcatcattagtgtaatcaaggtgggctgggttcccccaggattttttttcttttctttactacaaagaagacctccaagctcaaaattcatgactgggcttggagtcattttctcaactaagtctctcaccttccgcgctgcactgagggggcaaagtccatcaggttggaaatagagccaggtgtactgggtgattaaaaatgagccaccaacccctcctcctggagtgtgaagggctttaaggggaatctgtgtgccaactatgtaccctcttcctgaaatacagatctcttgggcctccccctgaggagatactcatcctgagtcaggcctctgttgagatctgagctttgcaagctgctgacgcattgctaacattcttactgagatgtaagttcgggaagcagtccatacaattcaccctttccagggtgctttttcttaaccccaatactcatgcctgatcccccagcataataatcgttaagagcaaacactggtgtggcactaaatctgttctgggcatgatctaaattcttaacttgtagtaactcatttaattctcaaaaccacttctgagacagccatcattctaaactaaaagagacagcttgagtaactggctcaagatactaagtagtagagtgggcaatctggctccagtatctgtgccaccaccctagacatcccagccctgatctctgtgccttgtagaaaccctgagaaactcttccatgctgcccatgcctggagggagggcatcaatccctggccggcaagagtcactcacttcagcagaactacagcagtcattacttcagcagaagaaatgtcgatgattggacttgtgaaagagaatttaggaggaaaattaacagggccacagaggggtgcaaatgagataaggtgtgagagaaagacttctgaatgcaaatgtcagtcactactgacaatgtggaatgagcataggaatttaaagtctaagagacataaatttgagtcctgatctgtgacttagtggctgggtgaccttggttagactgggtcgcataatctctcccagcctcatatgcctcagctgtaaaatgagagaaccacctgtaccttgcaggatcattgtaaaggtcagagtcaaagtacctcagggatgtgcatagtacatagagacgtccagtgaatgcagccaatatttctgtgactacttacatcttctaggggaaggtgcacctgtccttctcttgacttcctttgaaatccagttctctggacttcagtccttgtggtccacttctctccacaagattccagaagtgagtggaggaaaggtgctaggaagcatgagaaagatgaagacgcttccagttcctgcttatctgaagtcaagtgaaagtcaaggctcatggaggctgcagcctcacctcatcatcccgattcttctcagtcctgtgaggccctgtcaccactgctgtccctcccacagtgccaggtgaacagatgacctccaccccagccacatcaaggatccagcccttcttgcaggtttcctcttctgcaggggtcaaggccagtgacagcccttgtgctaacccaaatgactccctggctggcagtgcagccctgagaggcctaaggattcgtttctttccccactttggtgtccttttgtgggggcacgatctgaccacagggccagtctggggtggggataaggaggcagatgttactgatcttcactgtgcaaagggccagacacatattgatggggagggctgcaatggagggccccttgggctgcagcatgaggccaggcctgtggtgcttgtcactttcgaaggtttcgttggcgggtctgtcttcagtgtgtgttccttctcatcacacattcaccagtccagcttttctcatgtctcttggcttccccagtgccctccccaatagcttgccctgtatttctgcttccaaagaccagaggggtccaaggcaagtcttccacggagtcttggagaggcttttccactctttccctcaggcctccagacccaggcccttctcttcctgaggggcctgggccttgtagactccacaagttaagtgggtctagtggcctgcctggatccctgggagaaatccctgtatgggcacagcaagctgcggctcaaggtgaggcaaatgaatgagagtggagagaaagaaaagaaaggagatcctcgaatcccacccaactgaaaacagcttcgcacccctcacctcggggcctcagcaccgcctttagtggccttagctctaaccccagggtgcctgtttctgacaagcagtgctggctggggagaagccctctcccgtgagtgctgctcaccctatcaggagctccaaggcgctttaaggaaactccttttgtctctagaggatgaaacagattcatttacaaagcagttttcctgaacttagttaatgaccctgatggctgcgtgctctcttgaggggccagagaggcaaagctgagatcaagggcacttcactgtgcttctcttttcaacggggtcccattctgggctcccgaccacagcggctcaaatcttaatttgacatcactgcagatgaaacccaaaccgaagctctcgtactgttcccgcgctgagccctccctccccatctcactgaggcgcgcacgcggcctgcccttcccctggggccgggacctggggggttggctaggggcggccttccctgcactgtcgaccggtaagtcacccgggagcccaggggagcaaccaggtcctccacgaaggctaggggagcggaaagggaggaatcctcaaactgccatcggagctggaatatgatcgggctgcatggcttcagttttgagatcaaaagtagaaggaagggtgttcattttatgtgacttccgctccctgaccagttctgagcttgcaggtgggggcgagggttcaaactggcttgtagtcgcggggaggatattggactcagcacccaggggtcctgcgcaggagaaaccgctgtgctgtgctctttaaggtgctgggccgtgtgcagtctgggaggaagggagagccgcaatctctgtctgcggtgttcatttaggtctgactttcgaaacaatttagcaaagtgagattcgtgggccctagtctattcctagtcaatttccctccacgctgagcttcggagcggcagtgggctgggaagtggagtgggaggctggaccaatttgcctggaagccaggtttgcaaagcaggcgcaccgattctcctgggctcctatgttattaagggatgccctctgcaccccactaaagccaatcccctgcgctgcccctgtgcccgtcctctgtccttctccccaagctaaaccagcctgggctagaggcccgcccctggcctctttcacgcccactctcgggtccctaaaccatgccccgcccccaggcgccggggccactagcgccgccgcgcgcgcttccctaggaacgttgtccagcgccgcccgccgcccgccccttccaagctcttgcagcccctcaccccaagtggacccaaccctcagtccccagcaatgctaatggactgtcttagaaggcagagaactgcaaccctggaacccattagtccaaggaggacctatttaattcctgtaaacaggagatactatttaaccgacttagagtttaaaaataaacagccaggccttggggtgggggatggagggatgtcaagcaacggaatggcacggtgaatccacattccggcattccacacctcgagggctcggctcgattcagtcccctggtccaaagagtgtcgtttgacccgggttattcaatacccgaggggttatcgaactaatggctttccttttacttaaaagcccccagggattactgttgatttgctctaagacctttggtgcacgcagtagtcctagcaggaaacaaaagttctcgttctgccctgtttctatcataccatcttcctccccacagtctccacctcattcccttcttccttctccgccaccgccccagaaagacgtcaccactttcgaggaggtgtgtaagaacctcaaggactccagctaagaaaaacatgtggtgttagggcctccgatgcagtgccctgcgttccccgcgggtccaggtgacacgcatcctctccggtcggaaagaggagctttcaagtcctgattcaattggggggtggggagggtggagaagagggattcgccaggcctgtcgtgatctgtggtctgagtgacttttttcttttaatgcgcagaaaccacaaggatgtttgagcacgtttttagatcccctcccccatcggcaactccaccgcgcgaactcccagaggcccgagagcctcccgcgttgaggaaaacgctatgtccgtctcagattagcctcctttgccaaggaaactcgccaagaatccctgcgcaacctgcgctctcgctgtagagcatactaggtggtctttctttctttctttttagaatcttcttgcttttccctgtaaggcagaccttaaggccttaaggattggaactacaataactgatgtttaacagcaagtcagtgcctaagagtttggtctgtggccttaaacgtgccttacttattcgaaccagaagagcaaaacaaacttccaatttaaggcttctttcccttacccccaggctttttgcaggaccttccagttcacctggctggaggaggaccgtgagcctggacagtggcacaaaccccgtgcccgcgctcatgcaggcgcaccctcatacgcacacacttgaacgcttagcaagtcttttccaaggctgttccctctttccggggaaataaagcctagattggaaccttctgcccagcttcctcatttggccgtctggtctgcattagtgtttttataagggactcaaacaaatcgaatacaaggtcaccaaataattaacagttgtgaattccctccgtccccattaaaatacttccctgcttatatttcattttcggtttgccaacgacaacagggtaccggcaaaagcactgctgagttgattacaccactctgcggctcaggtccacccagaaacccgctgttttgcataacatgaggtaccagatgaacttcaatcgcgaggggactatgcaactctctgaatgccctccccgcagccgggctattcccagaatggtcctgctctgccctttggtaatcacgacccagaaggtgaatggagaagccaacaaacaatcagtggcaaactgtcctgagagttatttctagggcatcaagttcttcaaggatgttcccatctcgttttggtttttatctgttccttactgcctcctttttgagaatattattacaacaagaaaaaagtaaagggtattcttatttcaaagccatctggaaacctaactcacagcaatagtcttagactcatttcggttctctcattcttgagagttgttttttctccttgttggaattatgtggcacctttccctacataaactgaaagtctgaatcagtcagtctctttctctctctctctttccctctctctctctctctctctctctctctttccctctctctctctctctctgtctctctcttttcctccctcccctctatctctcagccctgctaaattcatagaactaattgtctggctttcccaggccccagggctgggggtccagggccccagtactagtagccttttaatgagttatttcatgagcaaattgtaatttcatcatatccaaccttgtccattctcatcccatgatggcacctaaacacacaggcacacaccttctcacctttatggatccaacatcatttttaaagcacaatataagagcatttttaaaaatcagggataatatggtttgtgcatctgctaaaataagaacaggaggaagcaaagcacaccaaaattcagaccctcacatctagtttcactcacactcctaactgggtcttaagtgactgcagacaaatattagactgggggaaaatctttccattttttgacttctgcttcttgtcatcatccattagaaaccacctcaccacttaaactatctatacagtgctctagttaaacatgcagggtctcgaatcttatataggccccacctctcgctagctgtgtgacctcgagcaacttgcttaactcctctgtcttctttacttcacctgtaaaacgtggtgatgatagcgttttcctaggaagtggttgtgataactaagcgagataattcatgtaaccaattttagtgcaatgcttggtacacagtaaattttcaataaatcgtggttactattattactcctaggtgtctggagagcatactgaaagaagggacctgttttaggtttgtttggtttcttttttttttccccaataagttctcctcctggaggatagggagaagtggcctgggatggagtacagaacttgctttctttataaacctaaagcgtccttcattcactttgggcagagtttatgcctgttctcccactctcaaccataggcttcaggtgtaactttggggtttccggggtaaggaaggctttttacagatactgtacaggagcaagtcgcccatgcctcctggactgacttcggggctcctttccttttcttcgctcctccccttgggggacccccggctccaccgagccaggccagccccactcgacggcgatttaaacatcccttaggcaaggcgccaagttagcgctgctggcccagctctaggcgggccgctgctctttcctcctcgccaggccgtccacgcgttgggggaggggaccctaggggggttggcgcggttaagagccccacgtgagaggggcggaagtccttgccaggagccggggatgcgcggctggcgggtcccttccatcacgggagacgagacaccgtttgatgtgttatgacatgaaccctcaattagatcgctgagttgaaacactccaatcaggggcccgatgctaagcaagccccggaaggtccagcctgaggtcaccgccggtgacacatcaaatcaaaatcagtgagagggaaagtgaggctttccctttatcaagctggggctgcagccagcaacgcaccccctcctctgcgcacccctcccgcccgtggctccgcactccttcacccccgcgcggcgtgcgacaagccgcaccgccttcccagtcaacgaactgcctttcttcgcattttctgagaacccggagacgcggaggagacagcgcctttgaagatgctgtccgggtggtcatgcagcgtctcctcccgctgtggaccgctcgcatccccagccctccaccgcattccggggttgtagcggtacttgtggatctcggtcctgctagtctggaggccttggctcgggaacagaggcctccccagactgggtgcacatgcaatccctcctctatctccaggatcgggggcatacagcgcagtggcggggatgggggtggggaggctacagggcaaaccagggtaaagtgatttcgcgtctacgccggattggggcccccaagacttttccccaacccttgtctgaatgccacaggcttccggagacacctccgaacagcccgcagggtcttttggtcctgtgccaaattcacagggcgcagcgaaccagttatggtgcccacttgggggaggggcagagattcttgccacttcattcccgggcaaagaaaatccgcgcccaaccgccggccagcctaggcctctgggacttcttctcttgaggaagggcctcttgagcagtcttctctgagcttccttagcctccttccgcaattgtagtagagaaagtgcacgattaacagaggactttgagggacagaaacaactgtagcaaggcgtgcgtcgtggggagggttggcgagctgcacgggcagcacggaggccagggactcagttgcactactacgaagaagccacatgtctttgcaaaggtgactttagtagccctaaaatcatcataaaatacctggcgttaatttgccctctggacctttcagcagctcatgaacctcgctgacctcgggctgcagcggcgagaccctcgagcaaggaacgcgactatgagtgagaggcggggactggagccggggaagagctcggggctgggggcgggggggccgttagcctgctctaaaaagcttaagagatgtgcgagcacccagggtagcagtggctgaagcagcttccgaatcccgaaccccagcgctgcaaggtttccgggcaaccccacttaactgggagcaggtcaaagtcatggagctaagtctagggaggatggaggagtggatatctgcctaaatcgcttttatcccgtcattttcttccttccttctctttactcttcctttcctttttctcccttcctttcctgtctccttccacattattgtctctctcctttaggagcttagtttccgatgcctgtggatccttccctgatttctgggaccagaggtggtgcgaggttttcttgagggcactggccacgctgcagatcaacgccggtggcaagaaggggccgcaagggtttccgcagacacccacacatgcaggcgttcccacagagggtaccagggatttcccagacccccaccagccctcaggaatagcgtagagagaggaacgtcgcctggctgagaaaggtggatgggcatacccatgtacctttgtgtattaagtacccacaacctccgaacttagccgtccctgtcccggcccgcccaactgctgccgccgcatctgcagaaaccactcgtgttgaggcctcggagcagccgggagcaccacgctggagcaaaaaagccggagggcgcagggctccagcccggctgaccatcccacccagcgcagggaccaacggaaaacccgcgcggcgccaggaccagggggctgcccgacgccgctcgcggactagttcctcagactgtgggactccctagtgccggctttgcccagggctttccaaggctgtctcatgccctagatctgccccagcagctcaggccttggactgcgaacccagtatcccgagacaccgattccatcagtccccatcccgacccctctccagccgggttcatccgcctgctgcctcccgtcctccacgtttcccccaccagccaccaacaagcggcaaccacgctgccttctgcaaaagaggaagaaggaaagaagggagagagaaagaaagggggggaaaggaagggaggtttagagactggaatagaatccgcagccacattcagaaacttactcgagcttgagaaaaacaatttaagaaaagtaaaaaggaagtgtccagagcaggaagggaattcacaaatgtagcctccagcgggaacagctccctggctgccgagctccagcgggaggggagtcgagcgttttctttgccacttacctagtcccctgtctacaaagctggtgatcgtattagccgacttggaagactggaaaaagctggcattgatgcccagcttctcagcgatggagtaagtcctgtagattgacagcatgtactcgtggggcaccacgcgcggacccctgcctggcggctcctgcgcccggggctgctgagcccggggttcgtcctgaggccgcggctgtggttcctggccctcccggcccgcgtcactgtcgcgcggcgcccgctgcatcttgccttccttgcggcttcgcatgcccttggtggaacccagctcggcggacgacgaggaggatgagatggaagcctgctggaaaccgggcaaatcccacagaaaactgatgaggaagacggccgagagcaggaccctgggagtatccatggcgggcaagtggctgcgtctccccaggaggcggtggcggcggcgcaggacgcgcggggcacggagcggctggacagcggccggggcccggctcctcgggcggactcggagtgcgaggagccgggtcccagccacacaaaccccggccccgccacgccccctcccgcccctcgccgggaggggaggaatggggagggagggcagaggaggggtggggagggtgggaggagagccgggtggtgcgggccggaggtgtgggggagaggggccgcggtgcgccggtgtggcaggaagacgcagcgcccccgcgggacgcgcgcggggttgccgggcggtgcgcgcggcgcgggccgcaagcgctgaccgggggaaggcgggcgctgccggcccgtggccggggagcaaaggctggcccgccgcgccagggtccccctcgaactcccggaggtgtggtccctccgcagcgcggccccggctctcggtcctcgccagccgcctccactttcctgggagcgagcggccccggaggagggaagcggcggcggcgcccccaagagacagcttggagcaggcgcctctgctgcaggctgcgtgctgcctcggggcggtggtaccctccctcctcggccccaaccgccaggcctgccgtttgcgcccctcaggggccagcccggagccagagaagcctcgccctgggccaggcgcagggcccagctcggaacagccccattttctcggttgggtatcgctctccacaaagacaggcgtctattcccgaccctcgaggtcaggcaaaggccacgagtctttagagtttggatcgatgctaaaagctgctgcgctcccctgcaggccccagcctctcctctcgcagtccccaacctcttctgacgcagactttagctgctccacttcttcgtctgctcccgggatcctctccctctcgcggcctgccccccgcctccactgcatccccattttccctctcttctttccctcccgcctgcaggacttcctccttccccaagttccttctgcattccaatccctcttccccagcctgcttttcttctcacactgccctcccatctcacactgccttcccaccctctctcttcccggcctcccccctcgccttccagtggacccctccctttgcagctctaccccaatctgtttctcttcagcccagcctcgccccatcacgagtttcctttatctgtccccagattccccgtgcctgtcttccccgcccactgcctcgctcattcctgggcctgcacgctgaaaggcgatgcggcgtagcgctgcttctgtctgccacagtgctctgccctggactgctatgggcagaagagtttccctcagtactgattgggtgctcaggcaccaaccataaagtaccctcctttaatcgtgccaacagctttgtgaggttggcgttgactattttcaccttcacggatggaaaaaaaaaagactcaatggaaataagtgacttttccaaggccactctgccaagaggttatgcagcaagggacagaacccaggctcccaccccaagcccaagattcttcccactacagcatagacagtcatt

SEQ ID NO: 225 - DNA, 30003 bp, Homo sapiens
  source 1..30003: mol_type = genomic DNA
gggagcaaggtgcaggcgcccccaggctgctggggacttcccagctctcagcacattctccttttcttggttaaggaagtttctaaagttgaccactggttaatcgttttgttattcatgctgagcaagaaaccagggtccaaataccgtgtgtgtgtgtgtgtgtgtgtgtgtgtgtgtgtgtgtgtgtgtgtgttgtgtgtttggggaggggtgccctcccagtagggagctgcccagtagtttctgcctcttattaatctctagtacagctcgtgactcaccatgaaactcacaggaacacgcaagatggcccaaaatagtttccagggtggtcaccaggtgtgatgagaaagaagacaaaacaatgaacccatggatccatggtcacgtctacatggggaattctgcacacgacaccctcccctggactgtgaaacaatcattggcccaataaaggctctgataagctctacagttatattttaaaccttaaagcatgggttgatgctatttaactcagtattttccaaagttatttgatcagagaaccatcctgtcctcctccctttttttttttttaaatttgaggagcatctcactgggtaagtaatcctggacacactttgggaaaatagctctaaaaagggagaggaggtaagcaggagttttaccatcttatgttcccgctccaagtcactgactttggactggaattttggcttggagaaaacgcagctggcctcagcaccaccctggagcctcttccagccagtcctggcagaaggactctgaatgcctgaacccacaggttggtacccgtgactccaccaagtctccacgcagggacggcgtgcatcgggaagagggggcatttcaggcaaaggctagtgcagcacaaatgccatccatggggcagcctaggctggggccatgcagaagagccatagagcaccatgcaaggccgccttttgatagtcacaaggcagtctgtgacgtgactcagtttcatacaagctgcttcttctgcctgggacgctcctgatctgttggcactgtttcttaacttcggtcttaaagtcatttctaattaaagcaagctcccctgttagtgtctatattataggatcctgtttgtattcttttagcgtttctcaacacagggatcactacatattttacttttttgaatgttgtctgtctccccgcaaataaaataactccaggaggacagcggtttttgctttggtcaccattagagccctggtgccaggaacagtgcctggcacagtgtaggcacaccataagggtttgttgaatgaataagaacaattttgcaagttttgtccctcctgagtgggtgattggttgctgggagttgataggcaaggccactgaccatccagtgggctgtgtggtaagaagggggtgattcctaagaaatacttgtggatggctgcctggcccagtgcatgcaaggaagtacagaagtacagagagcaatagaaatgagtttttatttgtaaaaagttacaaaatgatattgtacaaaaataaagtctgtagagaactttggttttataacacaaacgaccaagacagatcagagaagtcagaacttccaaacaagtgcactccttacggtatcagatggtgatcgcaatgataaagaaaaatcacaaactttacccttttgtggatttggtggagcaacttgcttccattaaaacctgcttgtggtgtgtaggtgatgccgggaacgagctattgacaccccttggatcctacagcttttttgggcagggactctccatggggagttgttggggggggtcactgaggttgaagcctgggaacagtggccatcgcactgccaaggttctctgaatgggacagatgcccctggggccacatccaaattgtgctccacgaatgactggatggctggggtttgtcactgtttcgagcagtctgaattctcagcaagatcccaagacagtgtgagagggaaggcctttcctccatttcccaggcgagcaaggggagcagaaaggacagagaagggcagaaccatgaagaatttgggtattttgggggaaggggatcagatgtctggtaactgctgcttcttgttactatgattatttgatggaggccagtatttcatttaattgctaaatctgtcatagttttatactagtagccactaaggtaggtagtaatagattatctccttaatgaaaatcccttttatgaaatgcgtaacaagctgtaatacagggcctagtgtgtcatacatgtgttggctgcccgataaattcacaatctagggcatggaggaggtggctgttcccgcccctatgcttcctcctgctccaacctctttttttttttttttttttttttgagacagggtaccgcactgtcacttaggctggagtgcagtggcatgatcacagctcactgcagcctcgaccttctggactcaagtgatcctccttcagcctcttgagtagctgggaccacaggtgtgcaccatcatgcctgcctaatttttaaagtttctgtagagacagggtctccctatgttgcccaagctggtctcaaactcctgggttcaagagatcctcccaccttggctttccaaagtgttgggattatgggtgtgagccgctgcactggccccgaccaccttcatttaaaggcagcacgctcctaagtatgaggctccatgtgtgtggctgtggctggtcccaatatggcttcctcagcacccttctcagccatctgctccccagggagctgtcaggtgtttgggtatataggagcagcagctgttgacccccggtgacagcccaggggttgtacaggacctggtagaccctacctctggaaggcccctgtgtctcccgggctgcactgggcagccagcatattctcgggagggcagtgggtgggcagggatggagggagtcggtagaacggcagctacctgacagcattgtcgacattacttttaggtcagcattaaatccaggactacctactaaaaggaactgaaccttttctacatatggttatgcatagtacagataggtatacgtggaggggactaagagcttaaagacaacaggaagtggagcccacgacatttctgttcagcaatggagcaaggaagaaataaagtcaagtgccagtggtctctgcacgctgctccaggaaagggggcttgcctgagatgctccacaaataaaaattgggaaaaatgctgaaatctggggaaaattaatgacaaattttcttaaaaaggtaaagtaagtgatttttgcctggcaaaaaactttttaatactttgaaaagcatggacccttgttcccaattcaaatttccttttgtcacctttctttgcattttgcgagcacatatactttggcacctttgaaaagaaactttaataaataagggaaaaaagagaaattcattagtgaacggtaataaataacaataacttaaatttcaataaatatcttctctatatttctgtatctgaaacagatgcattgcatcgagtagcttctctggtcactggtgaccacgcatcaacggagctggttatgtaacatctgtctctctgtaaaccaacaggcctgaggggctctccctgcccgggggcagttcggggccttccccgattctctcctacaagaatgctggcgaaaaccacaactcgtttcctgtttccaaggacataaaggaaataccttcaggtttgtgtttaatcatgagcacagcctttttggttcctagccaacttcttcccaccccacacaccgtgatggaaatcaatcaccaaccgttggcaaaaatgctggttgtagtaaacctcgggcctcaactttcaaatgcaaaggtgattatctcttgtatctttgctttttttttcccctctcctttccagggtatgtctccactgagtgacagaaaaataaacctcttactttcagcagtaaaacgtaataacaaggaacaacaccaggatctctgtttccctggtgtcttcggacacatgaaaacaaatcacaggagatacactggtttggttcaagtgcatccaccgcaaccgcgccggtaatcagtgatggtggactgtatcagctgaaatggtggcaatagccaaccaggaacatcagccctgagcttctagtgacatcggctgccatcctggagaatccagagggctgttttctctctctcctgtccagttgtctgtagctggatctccctctaccaggctcccatgatggctgccttcctcctcctcctcctcctcctcctcctcctcctcttcttcttcctcctcctccgcctccttggtcctcatcttccattctgggcaaacatttcctgggaaccttggtccctttctttgcactgtagcaggaatgcaatacacagcagtctctggagccggagtcagatacatccacaccttttagcggaatgctttcttagaatatggtaaaccaggttatcatctaaaaacgacaggtcatcatcaaaggcgatgggtctgcaacatgcctgccctactttgtcactcaccagccttctatttctggataagtttttcaatattttgtcgtacgttgtctcagctgcatcgcaagagccgctgcagtacctaaaaatcagttcctccttggtttcatagcccagacccaagtcagtgacatttaaatgtattgcagttaagacacaaccccggtttttgcccctctggcctctccgaccttttcctctggaattctctgggttggcagctgcagcctgccgattccgctctcttctaggaagcactgccatttgtttatctggtgaccttttcagtcttttaatggtggcttgaataaaatccatgacatcatcgaactgatcaggataatcctctggcatatttgctgttcaaaaagaaaagagaaaatggcacatgagacaaaatgatcatttcaagccgtcttcaagatcaaagtgcccccctaaagtcagcaaaaattggacccacagcaaaactatcagccgattaagctataggaccactgtaatccccaaaaacagaggcaaaaatgcacagaagaaagatgatttagttggaagaggagactaatgtggtggtgacatactttctcgaagaaaacaaatccttagaagcatagttttcatttgaataacattcaccatttttaacaagtccatgcagagcttgctgtgagctggccaatcttctaggggcatttttcttgcctagtcacacaacctagagtagtggttctcaaatgtgaatatgcaggaaaataccctggatattgactaccatgcagattcttggccctacccttggagacaatgagtcatttggtctggggagggaccaaggaatctgcatttctaacaagcctcaaggaattctaatgtaaaagatccacacaccaaagatccacgcactaaactttgagagacaccgtcttagagggtgaaaaaactgaggccttccactatggctaccttcatctggaatactgagtgctcttccctgaaacttgctttgattctgtgtggctgagtgggacaagaaccattctgacagaacaaatgaagagctcaggaatgcaactatagtttaaaatttccttaaaaatcataaaggaacaggaaaacagtttatattttactaacaaaaagactaatttaccgcttcctttgaacagcatgactttaacaaaaaagtccagtgatagagtaaaatggcatttatgtatcacagcaataaatgaaatgagatgctgttcgtgcatagaagcagccctgcccccaagggtgaggtccagcctcagctgcaagctgtcacatggctcccactgtctggctgcaagcaggacaagaggctcattagggagatcacatggaggaaggatgcagggacactaagatgtctgagacctttggtgaaagtataaatcagcagtctcttagtgctttctgccggatttcagtgtttgctttggccaatcaagtcagcagagaaaaataactaatggaacaatgtaataaatttctaaacggggggaaaaacaatccaaacacctgtttcttgggtagtaggcctcttatgcccccctcacctcatttttcaggtcatttagtatgtttaggattctaagtggcttagagaaataaaccaaagaagagttgtcagcaagagtaaatgttttttgccaagattgtattaaagcatagaaagattacattatgtctaacccatgtcaaattgttttgtcataaacctaacctatttaattgttaaaatatatcaggtatccctcctatagaacaaaatctagcaaaagcaacttaaccacgtgtgtgtagagtgtgtgtgtgtgtgtgtgtgtgtgtaatatataaaacatatgatatataataatgaaaagactggtgattggaatccgtagaatgcctagttgctatctgaaatttagcattggcaggatcagctgcacggaaatcacaaagctgtttccacactggctgaagccctgtcacctcttgcctggataaccacagtggcccctgaactgggcttcctcattctacccttacccaccttcgatctattttctacccagcacccagagggatactttaaacgcagaacataacctcctctgctcaaaaccttccaatagctctctgttactcttagagaaaaagcccaaatccacactggccctaaaggccctacctgacctggctgcccctctcctccagcctttattacctctgacctcctctcttgtttctcttcttgttccctcccgtctagctaccctggcttccttaccattcctcaaacacggggctcagtgtcagcaccactgaccttttcggctgggtcattcttcattgtgggaggctgtcctgtgcactgtaggatgtttggcagcatccctggcttccatccaggagaggcctgatatggtatggctgtgtccccacccaaatatcatcttgaattttagctgccataatccccacatgttgtgggagggggcccagtgagaggtaattgaatcgcaggggcaggtttttcctgtgctattctggtaataatgaataagtctcatgagacctgattgttttataaagtgcagttcccctgcctgcctatgccctcttgcctgccgccatgtaagatgtgactttgctcctcctttgccttctgccatgattgtgaggcctctccagccatgtggaactgtgagtccatgaaacctctttcctttataaattacccagtctcaggtatttcttcatagcagtaagaaaacagactaatacaaggcccatagcatcccccatcctagtcatgacagatcaaggtatctctggatattgcaaatgtcccctaggggcaacaccatcccttgagaactatagcttaaacagtcaagaactcagggcctttgtgctggctgtcccctctctgcctggacccttggcctatagagcaatttgcattttacctgcaatataggtaggcaaagaataccagattaaatgtctcccaccctgtggctagtcccacatctccttcaagtctttgctcaaatgtcactatccacaagtcccacctgacctccctatttaaaacaagattcctccccagcccctaatccagatacccctgccctgcgcctccccctccaccataattcttgctacattctaacacaccatctaactgatttcttagggttgttatttatagtctgtcttctctaaaagaatgtcaactccaagaggcaggaactctgtcctgcttgttcactgatggatctccaagtgcttgagtaggctgtggaggcctacggtaactgctggctgaatgagtcgggtcattttactaggcggaaagagagttcttaatttttcaaggggactctgggactttagctgaaaactgcatcgttatgaaatgaaatgctccaaagtaaacagcccacattactcagaaaagccactctgccctgagtggcacagtcattgcccaccagagagctgaaggactgtctccaaaccacctttcctcctcagctttctgcagctttgcagcagcattaactctcagtgcccacctcccctgggtctcctaaagctctctggtccctgagtaatgctttcttaagggggcccagggaagtgctcttttctttttttttttttttttttgtttttgagacggagtttcactcttgtcgcccaggctggagtgcaatggcatggtctcggctcactgcaacctccaattcccgggttcaagtgattctcctgcctcagcctcccaagtagctgcaattacaggtgcccgccatcacacccggctaatttttgtatttttagtagagatgggatttcaccatgttggccaggctggtcttgaactcctgatctcaggtgatccgtccgcctcagcctcccaaaatgctgggattacaggagtgagccactgtgcctggccaagagtgctcttaatttgtcctttcctttgtactgctttctcactgaactttctttaggaagttttctttcaaaacaaaacaaaacaacaacattaaatcactttggttgacagaaacaattgacttaaaaaaaaatgagctgctttagctattggtgatttctttcaataataagctattaaagaggaaataaatacagatgtgcccagtttcaaaaaaaaacatgcttgtatataaatcggaacttatgaaacagatctattaggagtgattaatcaaaatacagaagagtcttcaaattaaaaaacagagactctgttttacaaaaggactcacatcataggctctattcaagaattctaaataagtcattaatttaggaacctgggcatatagaaagttaagttcaattaacaatcaactgaagattaatcagaaatgagggtaaaacattactaaaattttaatataagctaataggaaaacattagagtcacagaagtttaaatcatgctggtttagagactcattaatctatatgatatataactttttattactagagttacaatcataaggatttgaatcagcacttatagtgttcttttttagcccttgatacttggaagaacttgaaaaacatttttctcccctttttaagacattttgaccacatggctttgtcacaggctttgtttgccaggtaaaatacagaaagcctggttgtatttgaatttcaggtaaatagtgaatacacgtcatagcaaatttgtccaaacccatgggatgtatagcaccaagagtgaaccccaatgtcaactgtggactttgagtgataatgatgtgtcaatgtaggttcatcaactataataaatgtagcattctggtgggggatgttgacaatggaggaggctatgcatgtgtaggggtagggagtatatgggaactctctgccttcctttcaattttgctgtgaacctaaaactgctctaaaaaataaagtctattattattattattttttaaagtcttcctggcatgtggcttttgaaaattccttcctttgatgggaaatctccttcacattttgttgctaatgtggaaatattatttaaaccccaagttcaggccataggcaactcttattaagctgaaggcttttttttccttcatagtcatgaaaaatagaagaaacaacaaaatttttgctgaaaaatttacatggatatgaattctggaagccaggaaagggcaacattgtatttttcaaaccacagggcaaataggcctgcatgttccgactaaatgagttcattcttagagccagcctcaatttatcgatgcgaggcacctgggggcattaggcgccatactcctctgcagaggatgctgggcagcctcactgagcctgtccttaattcttctgcagaggcctctcacccagcccagacaagaaactcctggtgatgagctgaaatgcccacagctgcctccattttccaggaattcactgagctgagggaaaagaagaggggtctgggtttggattcgttccctaaattaagacttactggcgcatctctgtcttcatcctttaaaaggcttggcagaatgtcagatatgcaaatgaccctcatttattaactttaatagtgaaatacttgcaaaccacaaaagaggagcatcattaaaaaaataataggtcatatctttgctcatttcccagacctgcttggaggatatatcttggaaaacatgtccatctaaaatataaagtttttggaaatccaaagtgctcaaatgcatttaagctatccttcagagtgcaaccaaatgttttggtgttattctatttaaaatattttaactttgatgtgttctttgtataaatagtgttacttaaagaaatgaaaccttgtaccggggcacaactctgggaacaaacagttcaccgcaaagactttgctgccctcgattatggggaaaaaaaatagtaatgtcatcccaggaacaaaggactgagatagtgactattttgtaaagtcaactgagttttaataggaacaatggtgagggctccaagtcctccctgtaatagctgaactcaaaattacataatccaaaacattacattggttaagctggcaagagtggacaaagtcttttcgtaaaatgccagatttgtcttaaaacagtacaggttaactatattttaatcaaagggtcatttttctacttgtagctggttgtcccctcctcagcctggccaggcagggagtctaagctgactttcattctaagtcatcctaagtccccaacctgtgggcctgagagggagatggcacaaagttgtctatgagggacaaagtggtgaggacacaactccttatccagaaggtggaaggaaggtctttgaggctcagagggacccaggagagagggggcctgacctcagtacacacagtggtcctgttcaggagatgtcttccaggccaggcttgagatctgcatgagccgggcttggctgatgcaggggccccagagagaaggctcaggggtttcttgctgtggggagaacagccttgctacttcactatagtgtccagcttctgtgcctggaagggtgagggctaatgggacccataggggtgagctgctgcctgagccaaggccacacaagtgagagatacatcaggaaccagtggccagatggtggggctcagttttgggatggggcaggatgctgaggatgaggccacaggatgctgcacctgcggctgccgaggtgcggtgccatccatcctgacatgtagcggttcctatgaaaggctgtcttcagacaggaggaaaatggaaaaccccctaatggtgggagacatttaatctggtattctttgcctacctatattgcaggtaaaatgcaaattgctctacaggccaagtatctgaaaaatatagagatctctctcgatctataaacacatacacatacacatgcgtgcatacatatgcgtctacacacagagacacacatatacatacttatatgaaaagaaaagatcaacttaaaattgatacaacttctcaagaagagtcccaatgaatgtcattgttttggaataagttatttttatctttctatatgttacaaacatgattttctttcactaatattggaatatcattacaagaactacatggctgagtttaacctgtaaaacttcttgcattacaaaatttcatcaggctataacttagataagagcttccttgaagcacttaaaaaacattaccagtgtaaaggtggaatactgcctactttcacacaacattaactttaaacctgacaacctcccttcaaggctaaattgaatactatctccattttacagctcaggaagctgaggctcagagaagacaaatatttggtgaagtccataggactaataaatgtggacctggtggttcagtttcaaagctcaaacttgttgtctttttgttttaaagtaaaaactctactaccactgagctcttcaagtcttgcagcagatgggaatttactctgagacgagagcaagacatgctggtttcacctgtacacatttaccaaagtcagcacaggaggtgagaaacatactttctgttgaaaaattcagtacgaactcaggtacgctaagtagatcctaaagttaggctgccatgggccacagaatacagtaaattgtctcccaaaaaggaaaagccatgctactcaggggcatttctcctgtgtcctggttcttgcatatcacgctaagacagctctggcgatttcccagttaaaaccggaaaagccgcagccagcacagcagcagatccagacagagaggccccatctccggaagctcctccaactcatgctggcaccaaatgaccaggctcttgctgcagagttggagacaagagaggcccggattccagtcttgggtcagtccctgatcagctgcgtgaccttggaagtagtcacttaacccttctgaggtcaactcagtgctctctggggccttttccagctccaaaatgctaaagtgtggagagtctaagtcttggctggaaagtgtggccagacacgggtttttcagtcacctctgcaagggagtagaccacctctggctgacgccccagcagcattcagctcagccagtaccatcaggggccccataaaaccccacaggaggtattttagaactctgcagtgcttgacctcttcagtttacctcttggctgaatgtctcggctacatttgaaatgaccgtcatcaatcttctcttaaatcatcaagtcatcttcctgtgccctatttaagagaggtaaaagatgtgtagaaagggccctgtatctgcatatgaaagcatccagattctactgtaaggcattcttaaacttcagtttccatctgtaaaaatagagatgggccccatgacccctgagaggacacactacagcctcacgctacaattccttcagtctccatcacccaaaagtcaaacactcaatttaccattttcttcgaatctcaattttattcatttctgtttttgctgcttcaagtatgcttaggtcatacccagcttatgactccaaggctagaattgcccactgcaagtggtacaaaatggatcaggagagccaagcagcttgtccttgaagccaatctctgggctgtcaactcttgttcttatttgaccttcaggaacctctaaaatgtgcagtccatgagaatggactctaaatgtgagtttatgagaatgttctagttctctgaaaaacttctgtaaagttttgttatctgctcctatttcaaagtgatgactttgacacttatttgaactactttttaaaaaaggcccatagatcagtaagcactgaatgctgatgcatcttacattatgtaatgaccttccgtgctttcctattttggacacagaattcatctagtgtttggtagaccgtcctgatcataggctgctgttgggttaactttcagaagtgtccacagcatctattttcctaaaaacaattaccagctgaggcaatttactaagtcattgtgaccatttccagagctaccagtgcattctcttcaggaccagtggtttgttgacagtaaggcatgacatcgatttatttgaaaagtatttgcgttgtaaaaacaccactgttttgttgttttaaaaaagcatttctggattctctcaaggcagaagaaaaagaccaaccagaatgcaaatcactttagaatatagaaaaagaagctatgggtgtacttagaaaagccactttgcccatcaaaatgccatcttatttaccatctccacccactctgaatgacattgcacatactagttgtactatatcctaaactgttatcctacaactcaactaagcaaatttgtaataaatggactgaaaattactccatcaatacaaacagccagaaaaccccactcagggagagacagacagtaaattcctttgttactcaggttctgatcaccttgctctgatttctatgtatgtggtccatgcttttattacagttatgctaataattttacagtaatacagcacagtccccctgggtggaaagtgtccattcttcagcttttaagtcaggaaaacacccaacagggtgttcatttgttagctaatccatgaacacctggtgtgagctaaaagcactccagagtcggtaataaacaccacaagctaatgagcacacaccaggaggtctgctactgcccttataaaaaacttaacagggaagggtgagaaagttacccagtaaaattaagtgcacaaaaagccactagggcaaatcatccctgtggtgttatcagaggcaggtggttgtgggggtggtggagtctctcctttcttctttcagcgaagccctgcccccagcctgagaggctgcaggaccctgcaggattctgcactcagcatccctcagctcttcccaggggacccactgagcagtaggtaaaaggcatgtaagggtctcagtgatttgaacaagaaggagggactaagagaagatgaaagaaatcttctttatcatttgaatttgtttggtagattcttgtggtcagatatgaggagggaatttctacccccagtgagtgaatttacgggaatctcaaagactcttcaggtaatgagatacggttatcattctaaaacaactttacctgccaaacccattccctgattttttttccttgatgactttttgatgcagtcagaagagtgacatctgagtgtcatgggctggcaggaagtgatcttgtgcagtagtgacaagtgtgagtgctggactcaggctgccctgtgtccagaccctggctaagctgctaaccctgtaagcctcaatttccccatctttcaaatggggctagtcacacctttaccttcaggtcaaaattaatatgataacataagaaaagatttcagctcagttcctggtccacagaaagtatttcacaaatggtgcctaatgtaggccaatatggttatcacatctgggatcctccttcagcaatatttgcacagaaggcagcagtgtaaagccaactctacagtctctagacaaagcaagattgcccaaaaggggatccagacactggtccctacttagtctagcatgttctacagaggagagacctctgtgcagggcctggagcccctggcatggtgggttgtgggcagaagccacaggcccgtcttgggaggctgtgtgagctcttccgtgttcctcaaaatgcctgacaactaaacatgcaaatgtcagcagaccccagagcccatgagggttatctttgtgtccactatggcttagagcagtgtcttcagactgaggcacctggccctctgggggcacaggaagactttctgcagtgcctatgggtggttgaaagggaatccatgtccatttcctcaatttccacatgtgccatgtcctaaaatgtctggtctgcctgcggatgctcctgctgtggttctccttgcccatgtccccttttccaatccctctttatccttactgagagacggtgtgcttctcacctatctagccattctattgtggggcctgtcccagggataaacaccttcaggcgccatacaaaggcattcatgcatgaatggctccttggaacaaactgatattgggcgcttcctgatgtgaggacatagtgccatgaatatgatattccaaggatgtttccctacatctaatcatgtggaaataatcagacagatctaaactgaagggtagtctgggaaacagctagcaaaagagcccagagttttcacaaatgtcaatgtcatgcgggaaaaaaagacttgggaatcattttagattaaggaagtataaagataccagacagtcaaatgcaatttatggtcctgggttttaaaaaaaaaaaaacaaaacataaaggacataattgctacaactggggacatatgaacacagactatctattggataacagtattatatccatgttaaatttcctgagactgataactgaattgtggctatataagacattgtccttgttcttagaaggtacatactgaaatatttaacattctgatgtttgcaacaaattctcaaatggttcagaaaaaaacgaggcaaaatgctaaaaaagaggttaatcttagtgaaggatgtatgggtgttcactgtgctacaaacacttgcaaagggagataactttgtgaataaaccaagaaatcctgaagccagttgctccatatttcctcctggccaggccccttgggaagcctcagtgctttctttgcttatctgactgttcacctatccatctctctaccttacaattaggatccagaattgtgacagttgtcatggggtgtatattaacatgtacatttgaattgaaaatgaagtcagaccttttctgaccaaaaagccaattgatttgggctgattagtttgatcattttccatgaactaaataaactacataggcaggtgcaaagttttgccaaaagaatatttaaagcatatatacagttcctgaaagggctagaaatgacatctggtgtaactatttaaacctatgatgaaaaattttagaaagcttcaaagtaggtaatcgtttttcaacattcttatttgcaggtttgcaggcaaaaaaattggaaggccatattgttttaaaaccatgcttctctacttcaattttgttattaaagttatgcaaaagtgggttttgcctctactgagctaaccagttgtttcccagtggtgacccaagtctgcttacgcatactcctattcccactgaggccatcgctctggcactcgtgcagtcacactaggttcctatgtggatgccatcccctcgctgggcagaatgggagagatctgagaaccagagtctcccacaaggcctcccgaatgctgtctgcctaccaagcacttgaggagaccttgctttgttgcaaagagttagggagccttctctcattgcaaaaagcatcaatattataggaatacttagagaaattcatgtttctcttcttaaaaacatcctgatctggactttgaagtagtcattagtaatactggcttaagcctaccgcagcccaaatggagattttaaaagggccaaaaggaaatttgatagtctctgcttctcttttctctttgcttgcttaattttcctggaaatctgtgtttcagggttagtgagtgcatttttaagcaagccaaagtctatattttcttaattcactaatatgcacacacagtctgtgtaaagtcaagaaatattggctttcggaccaacatgctgaggtttaaattctggcttcaccacttactaggtttgtgacccggaacaactctctaggtctcctttcttcacctgtaaaatggggataataatatctcctcttctattgtagagctcagacttacttgatttcaggacaagaactgtgttcatcatgtggatagttaaaaggtgctaggtcattaactttaatattaagtgtttatttgcagatattcacttacttggggctaatagtttggttcaattgtgcctatgtctagaagatttttaaaaataaaagcacaacacctcaaaataaaagacatgcttacggcataggccccactcaaaagcagtctgggtatttaggtaacttctcctgcaagacagctttgaagcaagatcccgccttgtagtcacctgcctgctccatgggtgccccactgctatcaaaaacagagcaaacacctttcctgaattttatagtatcacacaatctggtatcacctgtcaagacatcttcaatttcccaccacttcttagcacctctttctagaacttggagactggtctgtcctcctctttgttccactgtcccttccccacatcatggtcacaaattttcccatgctactccctagtatgtccccctttccttttcccttcccttccaaacacccatctttcaagtaccaggtcaaatcctccctcttccctgaagtcgtccctgctatgatacccaaatcccagtgagctcactgctaggaatttttaccacacatgcgtacagctcacctaaaccctacacaatagacatatctatctgactgacattctattcatccatccagccatccgcccatccacctagcaatagtttacagctagatcacaagcaactttatttacaaatttagcctttttgaggccgcatggcacccagtacatgaaagatatttaatatttgtttcctgattaagcttaagtaattaactaaaaaacaagtattttaatcaaatgaaggtgctatggtccatgagtgttaaataaacaaagatcaaagagatattaggaggggaaaatatcagggagctttaatttttatatctgttgaagaagaacctgttgagtacattgctcacgccctgggtcagcctaaggtcctgactggccaaatcaatttaagccttaaatagatttctctaagcagtaacagtttgaaatggttttccagactggggccagaatgagaatattggtctcagatctcaagtaaagaatcagtgcctcctacaagagtctgatgtgcagtttcttgattccaagagacccatcccaagtggcagagctcctttccagcttaggtagttactttgttaaagtattgttcattcatacagtccctaagcgataagacacaacagatagatggtgtttgttcattctaaattctgtatttcataacattagatttgaaagcttaacatttacccagcttgttgcactagaagcttccttagctctatagaggtggtctcacagtttactaagtattttttgctagggttatgaaacttcttaaattaaatgtccagctgggatggatcatttacaaagatacgctccatctccatacaggtagcctccaactcacaaccctcttgtcacttccatagaaagatcctaccctgccttggttccctccttcccatgacggaagaggtctccctaacataaccataggagtttggtgagaaaaaaattccactggaaatatatgggcttggaaactggggaagggtcggagctgtgaaacctgggaagagccaggggcagctgacccaggggcagaatcccaggcaagcctggactgcctacgtgctgaccaaccaacagtggggcccaaaatagcctgcccacaaggcctgcatttctctcactcgctgtactctgttgtgctgctgaaatcccactatttagagcagcatcctggcagatgtcgtagcggaagaagtgaattcactgggtgcccagggaggggccattgcaagcaggagggtggcaaatgacaactatgatccctatttatggagcagaggctttacaaagcaatatctaagttaaccctcacatcaacccatgagacagatttactcttatgcctattttacagggaagaaaaaacaaagcttaagggatgttaagtaacagctcaacatctcagttaagtggcaaggctggggtccaaatcctagtctggtctgaatgtgttaccttgagctcttgcttgctgaaacctccctgatttcttgttctgtgccctccttttgcagattatgggatgtgccccccagggcagagactctcacttagtaatattgtgaatgacagttcagttatatcgtggtttacataggtttttgtgggctagcctgaaaacttgatagcttaatttaaaaaattgtttccataggaaattttgtgaactgctaccaaactggtagaatataatcccattatattatactaaattaggaattacttgtaattacaacttaacgatgctcaatgtcattttagttggtttccagttgcacaaaaaattcagcccaccttactggactgaggttctttcacgttgattttttcataccaccacacatgtgcatttactagaagctatgttccatgagggcagcgacttttgtttattaggtgtatcaaggtatccctagcacttaggacagtgcctggcacagacaggcatacatgtaactatttggtgaatgtatatgtgcatttagatgcaaatttttaaaaccacatgcattttatgcttttacttattaaatacatttagagttgagataaggaatatgactatgatgaactaaccttcaataaattcagacaaccttgtgcaccatggtctaaatcattagttcaagaccttcctcccatataaagtatcctccccttcccatataaagtacatttcagtagtttgggggaaactctggtcccagcttcagacctgcctcctgtgatcatggaactgtggtgcattatagacaagttgctttgcctctttaggtttcaggactagaggggtttcctttcagctcgaaaatgctatgacatttgcaagtttcaacttgcagattcctcatgcctgctctaattgccctttggaaactggcaaaaagcaaaatactggcaaaatactggcaaaaagcaaaataaacaaataaagatagcaaaagagaaaagtcttgggtaccccaaaagtcaaatcacaagtccttgagtttagacaggctagaagttgctacaggaggcagtcctgagccatttactttacagccagcctctaggcaagcccgttggccaattatgaattccatttggttatctcacactgagggcatactagtaatagaattctggatgttttatttacattggaaccagcggaacacatgcaatcttaaaggtgagtgtgcaaactgtgtatattctggtcctcctgtgaaaagcgcagaatgacgttaatgtggcatgaaagctcttttgctcaatcattaagttacaagtatttggatggaactagaggaatcagaatttatgatactttctatttttaaatgaaatgtggtgacttaatgtttttctacataagccttaaccagttgcaccatgtacagtgcaggatataaatgtcagcactgtgacagaggcgtgttgacactggttgagtgttcaaagtctgcatactgtcattattttgccttccctgcacttgacagcttgctaccgaatcaaacatatctggaaagaagtcaatttggcttagaatgcagctcagtttctctttgggaacgtttctttttcaggtttcctctgggatctattgggtcttcccacagacaaaacacaatggggtgtgttttgctgttcaaatgtaaatagagtagtgagaatcttgttcactgatgacacagcatcaattttggaaaagggaagcaatccctcttccctacaacatgcccttgtccctgcaatctgtgttaactcgcttgctttgtgactacttgtaccttatatgagccaaagattttcttgggtgttatcaagccatggtgattcaagtctggttgcacattagactcatctggggaacacctaaaaactcagatgcctgggccacaccccaaaccaactaaatcagaatctcctggggtgagacctagcatcagtagtctttaaagttccccaggtgactccaatctcttcttaggagattcttcccaaaggactttaggacaaacataaaggccaaggggcaaatctcatagccactgggattgtggagtagaaaggcttctctttatggtacagttcattgagctctaaagtaacttgcctgaaagtcacagagttagttgaaagcagagccaggagcctgagccagaattaaatgaatctagttgaacagggcactaatacagcaattaaacctccatgaattaatcagctttgtaatcaggcacagtcatttttctcttggcaacgtctgggttagagaactattatctgccactgtgttcctgtccctcttgtctagaccgtttgagtgaatgaatagccagttttggaagacccggcactaaggggcattttaaagtttctgttggagaaacgtttatatacattaaatttgtgatggaaataaaagcctttaaagtaggtttatacagttaattgacagacactcttggaacaggtactttagtttcaaaggattaaccatgttccctaacttccttttgaagtcttaatttgccttataaaaaaatccactttctatctttcttgggacttgtggaagaaggtgcttttgttgctataattaagcataaaataagcacattgcatttactgggttgtttcctagccaaggccattgggtttgggggactcagcgcacagctgactactgcaggactactactgtggttatgaccatagtaagtttcaagcgcaaagttactagagggataattctgggggtggcgttagggagggaagagtagccagggtggtatcctagttacacacagctcattcctgctttattttggggttgtgtgaaattttctattgctatctttgttgacattatgcctctgcaacagcctctatcacatgtaatgtagcctctctcacttcatgcaacaagcttctgaggagtggagggaaaacgagatcacatcacagctgatatgccctaattgacttgcttctaaaacatgttaatttttgagaggtaaatcacagacttattttctaataagaataacctgggtttttttctcaagagttagcattgtctcacgtggagtgagctacagtctttgtccctagtcccagccagcactatttatggttaagtctttctagaaccggaacttttctgaacagaggaacttttctgaacagatttgacattacccagacgcttgttctggaaatggaggcccttctgtgttttctctgcctctggcttgcttttgtgaaaagccggcctctcgccttgcaggcgcagtttaggatgaaagtgcaatagttctcagaattaagcacagccaggcacagacacacagataaagggctttggaagcaaagaaaaactgggagtgtgtataggtgaggaaacagaaaaggggacagctgtgtgtgtgtttctgaggtggtggtgctggtggggaggatatttgttcatcagaatgctaaaggagcagcataaaaattccatcccctctgtgctgggcaaaccagcgcgtgtcactttcaggccaggcgtgcgggcagcagtgggcagccaggcacccctgggggcttcagcacccgcaccccttgcccacgggtcggtaggccacacagccatcaggctggcttggggtacgtgcggggctggctgcgggtgggggtgcgagggggtccgccggcggcccccccgcggggagggaacggttcttacagtcactgctcagcgcgaagggcgcgcggcggcggccgagggagcggtcttcggcgggcgcctcgggaggcctcttaccggcgggcagcgggaaggcggacgcggtgtggagcagcaccaggcagacagccacgacatcccataacttcatcttaaagtcccgtccggcggcggcacctgcgcgggcaggcgggaggtgggggagagaaccgcagaatgcacgttaagcctgggctccctgcgggtccctgcgcccctctccaacctcgtcaccgccctcctccggcaccgctgcaggccagcggctcctcgggcactcctgccctccttgcaagtccccagttcgcttctccctcctcagcgcgccccaggagcagctcgcactcctggttcaggttgcagctgcccttctccaccacacggtcttaggggtcagagtttcaagcagggctgctgtcccctccagttaaccccccacccccaccaccacgattcctgtccagtcccctctactggtgcgcaacatcccccattcctggggggcaatcgggtagttcccacccttcgtcctccaccccaaccagagacctccccttcttgtcccggtagctcctataggcccctgaacgagccctcggcccaagcaaggacggtgtttctctttggaaataaaatcaagcgcattcccctgcctcgggtcccaaccgggcttctggctagtcgagggcaggctcgggggcaccactcacccagcctgccgcccacacctcattcttcccacctaaataggtattctgttgcgagagcaagaagttagcagggacttggagacttttggcctgtatgggatatctggtttaagttacttaacttcccaaagcactgattcgatttaaaatactcctcccacctcttaaagttatgaacattaaatcacgcatgacaagctctagcggaacatgtagtaagagctcagtaaatgctttaccattgctgttaggcaaagactgcatttgtcttgaaagttttaatcctccgtggtatacccgaaaaccctctcttgactggatttttgcacctttgagagattctggccctaatcccttcccctcccagaggagtcactggctccccgcgcccccgtcacgcctggacgactgtacccagtctcggacgctttggaggtgctctggcactggaaggcctagaccgtggtacggcgcagagtagggggttcagctcttttcagcccgaggtgggctctgtttggcttctcaatcctcacacccctacaaaggagggccacgcagctgggggtgggttagaaaaaggggctgtaaatttgggggcgagttccaaccaatgaggagacggggaagaaccgaggcatcttggggtgcagtgttatccagtgccttcctaatcccagggttcgtctccagggcactagtgacctagagagaatctcctcaagcggaatctgcgagattcgtgcagtcgattatcctatcccctcgaccggctccataaaacggttcttaggaaaaactcgattttttttttcccatgcgggagggaaatgcaaaacccaggttaatgcaaaaacctcagtgcctttcctagccattagttcacaggcacccccgcctccattccagggttccagtcctcatctctacccggaaccccactccctgtcccggtgcaggcaacccggggaagcctttaattcggccgccacctcccacctctgcagagactaatgcattttacatctcctgagcgtctgtttgttcgctatgcagctgttgggctcgagagggtgtagggactagaaactcctagtgacctgcagcaccgagcgcctcttgcctcgcgggctggtttgcaaactcgggaaaaagctaggttctgggtcgcgatgtgcagacacaggaaaactgcaccaggccatgcaaaatgagcccagaaaggtactttggcagctaggacctggggaacgcgagcttcccccctcaagccccccgccggtgccagctcccgggtgcgtgcgaaatggctggcggtccgaccggaggagcatggaggcgcggggttaatgcgccattccaaatcgcggtgcccgccagcaggaagccacagaggcactagatttcccttccgtcttaagagggttttcccttttttcctgcttggccgacggagggctttttaaattggacgtggagatcctcaattagaagtgtggcgaagctggcaaaagactacacagtggaaaactccccgcgtcgccagaggaggctcccggctgcggttcccgccctcggccgagcgccgccagcgcccggatcgagctcccctcttcccccgggacagggagggcgcattcttccctctgagcgccgccgggaccggctccagtccgaggggctctttcgttctcggtatttgctgggcgggggaaaaggggggaggttgggggactcggcacacacagcgtctactaggacgtttttcttagagtccgtgtgggctccacccctcggcttctcagtttgtctctctatcgctttcccaaaacacatctacatctgcccgacgcgcttctcctcaaccatgggcctttgcccgcggtgcaaactgctttacgcgccgccacgtgcgagaaccaagctctgctcctcaagtgacgggggctctgctctgccaggtgaccgcgcaccatttctcgtgcctggcaagctggtccccttctgggtccgggaccaccacgtcccggcagggcaaaagcagcaggccgtgggcgccggcacctgtgggtccccaggcctggggaggcaaggacgcccaggaaagccacagaagtgctcgcagaagcagccgctcgccgcgaggcacttctgagttcccggcagcagggggcaccagaaaccgtctgagccgtgtcgcgcccacgcggcccggaggctgtgttatcattttagttataaaaccggagaaccaccactccctctacgagcctcccgaaatcccattagcccgggaacctgtggaggtccttactggcatctctgcttttcaggctcccacccctccattctcgctggttttcctctccccacttcacctgagcgggtttcttggcaacctgctttcagaccatccctcaccccttccacgcgtcaccgtgacagattcgcaggaggcagcgctcccgccgtcagtgcccccgcaccttcttgtgcctggcaggctgggaggtttgtttgggctttgccttcaagatccaggtctcagagagagaaaaaggaggcggtggggcggggagacgggtttgctataaactcggtttttttttttttttttttggcggggggaggtagagacagaaattgctggaagatctattgcttttcttaactatgcttcgtgtccttgactgacagaggacttattctcccctcaaccccccataactgcggggcccaagatgagggaaggaaaaagaatttgggacacttctcgcaggcaaactgggaaagcggtctgtttaaagggccaggttccaggcccgagagcacccgaattgctagcgggaaagggctagggacacggcggacttcccagagatcggacacttgttacttgttgaaaaggcgccaccttccctgacaaagcgaaggcgcagcgaaacagtacgagtttggtcgaggccggctttgacggctttgcgggactgggtgcgtgaatgaggttggaagaaacatctcttccttgaaatacctaagcatatattccaaacactgagcaagagtcgagcgcgttctaacatctccgcagcaggggccggaagagttgcctttgtccccgcctatgagcagaagggtcgcgagctctgggatgggtaagccccccgggggcgcgcacatgggtcctggcggcggattctaccaaagccgaaactagctgggccccaggaagctggcgggaacccgcgaaagtccgtttccagcccgaagagggttcgtttttcttcgttggggcaggaaacaaaccaccagtgcggaattagcctcgaggtggtgtaaagtagtggcagtggtggtggggtgtttttggaaggcggcacagagtacaggagaaaaaggggtcattaaaataataacctcaatggcctagtggagtctcaagaatacgttcgagacagagatttgaatccaggactggcaagaaagcccctctcctaacctcgacggggatggttagttggggtggagggcgttaggaacgtgcaggcaaccgggtgaggaatgtagctttgccagacctcgcccggaggaggtgagccctccatttttaggttctcagcacctttgcagcagcccctcccccggcctgcgcttttccttggcacagatcaaaacaagctcaatagtaagttgcactcttggcaatgatagtatctctgcacgtccagagaggacacatttcgacggcggtgggttcgaagatgacccaagccctgaatcgttctgtgacttgacggaagagcacctggccgagtcggggaaggaaactgcccctcttgggcattccgggtccaggcgcatctggggctccacagatctttgcccacgtggaaaaggcaacatgcccctccgaaaggccggcctctctccggttctacttttctctctcctcgcatagcttaggttccctctagtctttccactttctactctcaccgtttgctctggggtccagacgcacccctctgactagggcgcccttcagccggccgcacccacccgcgacgcaggcaccacccgctccctgctccccggcccgctccctcacttacctcggatcgggtctccgcagaccctaggttggacattaactccaggtgccccaagtcccagccaggagacccatccgggctgatggctggagcgcggagccccgcccaacaggtcaggggcaagagttcgcaatcctggggtcgcgcggggcagcaagggcgcgctggaggcggcggccaagactcccgccgccgccgccgccaacagggcgagggctgccggcaactctcccgccgggcccccgcacccccagaagccgaggtccgagcagccgccgctgctttgggtggggggctgacagggctgcgcgcgtcgcgctcttggctggggctgcgcgggcccggggcgctgcgggcggctcagcggcagctgccgcgctctgcgcctcctctgggcgcactgcctgggagcacgagactggtttgtctgatgctgctgccggagctgaggtcttgcctggagatccgaacgagacaccacgtcaaccggcgcggggagtcccgtgaagacatgagggcgccaggagcgcaggctggtcttctagagcccgggctgggggtccggggtccggggtgggggaggggaggcgcggggccccgggagggaggggtcgggaggcgtcggctgggcctggcggtgggggaggagaggagagcagcgaggaggccctggagttcccgaggcggggggccggggtgcgagtgggcgacgcgaggcgcccctccctgggctgcagggagagcgctgagagcgcggagacgccgcggggctagcgccttctcctctccgggtggatcaaaaatcgagaggaatgtgcggcgctctgcgcgggccagccgaaaggggcaatccgaacttgaccgcggcgcccgcgccgggctttgcccccgcgcgccgcactgggagggtggcgctctgccggtgcagggcagcgccgggctttcctcgcgcctgtcgaaggccggccttcccgctcgggtgtctcgccctctcgcttctccgcagggcaggaggcagtggcgagaaaaggagctgccggccggagttctagcaccgagaaggagaggtgcggagcggccgggtgagggaagccgagtatttgccaggggacgctgcgagtggggatgaatttatagggctctcactccgtgacgtgccctccagtggcttttctgattcgctttctgacctaaacacacattagtttagtccccatgctaaggccaacacggtctccaaatatctgctggctgaagtcagaggctttgcatatcatgtattacatggcaggcaatgaagaaggcttctgaggctggccggctcctcagtcctaggctccattttcatgctgttgtaatctaataccagacatggggcaggcacatacattcaaaatcccaattccagaggcgtaagatcactttatcaggaacgggttaggggaggttgagctaaacctgcttttatccagattttcgaaaatgcagatgggaaacttcagcaagcgcccacttggatgctgagtttccagcgatcaggggcccggcccccattccagagctctgtggatgggagaggtgagaccttctgggcattccttttgttggttagttcaccaccagaagctgcctgagccttcttttgtagaggacaggaggagggcaagtccttac

SEQ ID NO: 226 - DNA, 260030 bp, Homo sapiens
  source 1..260030: mol_type = genomic DNA
tcctctttgattaaaaagtaaaagaataaagttagcagaggataaaaggtatatggagagagccacccacaaaaagggttgcaccggtgaaatgggcctgtgtaggtcacatcccctcagggagggtagcattgggtcccttgcatttcaaataaaatgcaattttaggaacaggggctgaagggagagacacttccacccacctcaacagggcaattttttaaaaatttaatttaattaatttatttttttgagacagagtctcgctccatcacccaggctggagtgcagtggcgccatcatggctcactgcaacctccatctcccaaggggtttgagagattctccagcctcagtctcccaagtagccgggattacaggcgcgcgctactatccctggctaattttttgtatttttagtagagacggggtttcaccatgttggccaggctggtcttgaactcctgacctcaggtgatccccgtgcctcggcctcccaaagtgctaggattacaagcgtgagccaccgcgcccggcccaacagggcaaatttaactgaacttacagtacaaccacccgaagctctgggaggatggcagagtgctctgaccttagactagttacttaactttttaaagcatcagacttcccacctgtaaaaacacgagaagagaaccttccttacagagctgtgaaagtccaataatacaaagaaaatataacatcacctggcacttggtagagtgttctacaaacgttaggaagaataaaaccagaaattccccccaagaccctcttcgggtgaggcccaggggccctggagagggtggcaggcccgggggtgtggggaggacactttagccagctgcccccaattctcctccaagcctggcggcccagttccgggctgtggtgtggcttgagggcccagggctcctcactgagcttgcttaagcaagttctttcacacacagccccatatacactttggctagaaaattcaatgaggagttttttcttccttctttctctgttgttgttgggttctgattacttccatctggcttcagcggctcgagtggagtctctaaaacacacaacacaacaaaacaaaaacccaccctgcaagccacatgcaccaaacctagaaggctgcttcgtttctcgccagcgtgtgctcagatggcgacgagggctagcggcggcgggggacgcctcaggacccccggcacctgcgctcgctgcccgcgggaagagggtccgcgtggacccagcccccgcgtcccttctctggcgtccccggcttccgcgcgggcgtccagagaagcgggcgccctgggaacagcgacccaggcatctccccgaggagggaagtgggaggtggggagggcggggggatttcagagattgaaaacagagcagcccttgcccctcagctccggagctcatctgacttgagttagcgacacccccaacccccccccccacacctagtcgtctaaaaaaagtgtcggagattggcgcgtcctttggttcctttctcgaactttccttgtaggtgcgttttctttccttggtgctgggtggggagagtccctgtgctccccctttcccctccccccgccccggcggcgttcgggtccccctgcgtcccccggcagggagcgggcgggctggctggcgggttcttggggcccgggtgtgcccgcaccgtgcgcgcgggggcgctgcgcagtccggcggcgctgatggattgcagaagtgccggcgcttgccagccgaggcagcacggctccgcggactttttttcaaactcccatcaatgagacttcgaggaggagcgggcggcggcggcggctgcgactgcgaacgcggaggaaggccaggagccgcaggaggagccggaggaaagagcttgggccgcgcggcgcgccgcagcctcggggagccgcctgctcgccggcggtaggggctgcgcggcgcccgcccgcctctcggtcccctctcttgcctggcccgccccgccccggctggctggagccccggcacaaggcagccagccgagggtcgccgcgccagccaaggtgggatgggggcccacagccaccgcccggcgcccgagaggccacctgcgtgctagaggcaaacttttgtctctctcggtaaagttgcattggccttcttttgcttgcttttcgtgacgaagcgcctcccacctcggccaagcgcgggccgactgggatgctgcgccgtctcggggggtccctcggccgggtaccggcgcctaggccttgggatcggggccctgggcttcgggggactagaggctagtaggcgcgaccccgcctggggctctggacgagcagggcggggacgtaaggagagtcctggggcttggagctcgtggccagaggtcgatgttgcaccctctccctacctgggggagagcaccactcttctcggggtgcacagcgagccggcctccgcgcgccggcgggggtctgttttttcagggggtggagggtgggatcggaggctgggatgctccgaagctgccgtaggtgggcatgggagcgtgtctgcgggcgtactgagcgcggaggggctgcagccagccacttgagaacttcgaactccacttctccgcgctgcgcgtcccggagccctgcctttctttcttccttcctcaatccttcctccccctcgcccggcccggccgccccctccccctctgctgggctctcctcctcggccccccctctttgcctctcttctcctcctctcctgccctcggccctgagatccgcttgacttcccaaagggatccgcacgtaatcctttgccgggtcctccggttcccccttccacctcactttcatccctgcccccctactcatcgtctctccccacccccgacaatctctcaacaagtatatttgctgaggaatttgaaaaatccactactgcaacttgatctgtatgtgatggatggggagaggcgcggagagagttgggcgccaatcctattaagggtttagagaggggagtcttttccccggacggggcgggggcggggagctgggagggagcgtgtgcttgcgtgtgtgagtgtgagcgcgcccgccgcgctggagagctgggagtccacccagctcggcgccttttcagcccggcggtaactgctgtcatttcctaggaaacccgacttttaccgcgcggggagctggggatggagcccgtgcgcctcaccctgggtgatcggtcgctgaggctctcggggacctcgagcccccccgagggtgcctctttccactaccttctcttttgtgtaattgttctgtggctcctagagttgatcccagctggaaaagtagacctgtccctactgtctggtcccgcgccctgggagtcttgtaggcgtccctctgtcccccagcccgggcatcccgctcggtgcgcgacctctggcacgggctttgcagctcggtggccgcagcggtgtcccgggccccctctccgccgctcttgccgggcgtgtgaaggtttaatcccgacagcttcagataaagggagcagttgtaaaacgctcataggctgtttgcagacgaggctctgggggatgtaggagaatttgaaagtaaacgtttccctcgcaagcagcataaaatagtgtttaaacaaatattgtattggcatgctcagggggctcggtgccaaaaagtaaagtaaataaactgtgaaatccaaaatatacagcggggaaagcggaggaataggcgggtttgtcacaggcctccctgatgagaccagtttgttccagccacctcacctgccagctttctctccgcccatttccttaccttgctgggagttcccttggctgggtttccctgtgtctggggacaggccctccctggggcctgggaacggctttgcagttgcttgtttagggggaagctcacggtgtggctacctgggcctgactccacagggacggggggcaccttggctatgcctggctgctttgagtttggaggctctttatttaggcttttcccagcttctggtctgtcctggggcagtcattctagaatgtggaatccagatccatcaggggccttctcttctttttgactatgcttcttgtgcctctttcttcatcgttcttgcttttgttttcctagacttgctgcttctctcttgagggttacaggaaattgtggagatgtttttccctgggattcgaattccactcaagcccagccatatggaaagttgtcgcttgtctgatgagttttaaagttaattatatttggtaagatttagggtggttttattttctcctctgcttcgagaaatatgccagtttcacgaaattgtttcgtgattttaggggatttaagctaatacagggaagatcctgcatttgaaagagcccagctgcccaggaggtatccctcaggtgaaccagccttcagttgggctagcatctgagtgagagactgtggtcagaacggtctatttgcaaagcctcttggagagaattagaattataggtagaaagaattagaatgatagtagaaagagcctcccaagccaccgaggaacaaggtaagactgctagagatggttttatcctctgtgggaatcgatttgactgaatttgcagtgggttcagattccttcagcagagacttccgggctgctcccaaactcattctgctctggccttgaaggggactcttgactcgtggcttccttgaagcttgtgtggagttagcgaggcccttgtggccaggcagccttggagtggagtgccacttcactctcccagggatgctctggtccactggtggagagagcaccgaatgcagagtcaatcctttgagttgcttggtcagaagagggggccgcagggcttctggtcagtggctcattgcctggctgcgggggtcttgggggctgtgtactgtagctggcttgtttgcactgcagactgaaaaatacacaaatacttcacgctttttgtactcccacaagtgccctgtacacagtgcagcccctggggctggattagcaaaccagggattcagcaggcaggcagacaaaattggatatttgcctaataaacacccttcttccattgtcccccacccctgccccgggggtactccacgggaaaacttcactccacagatgccagcagttccctttaaatgggagtaggaggttgtcatgtgcactttgaaagcttgtgtgaccccctcacacccagctggcttgttaaagcctagaatcggagtcctacatccttgtgtactctttgggtagggcagctggccttttcctggggaaagtgtgtttagcccagcttcctttcatctgcatggctcttgcggcagggaggtggagcaaaccagccttgcttcttggaggctgtggggaggagaaaggggttctacctgggccagagcctgtttcctagtggacaaggggcagccaggccaggtggacctcgctgtggacagctgcagctgttcccgctgggccagggccctttgaaaaggaacccgggggagcacttcccccctttcttcttttcactaagtgtcagaggcatggacaagtgaaacacgtgaagaatgccaaagagagaaacagtgttttcagattccagaaaattcagaggcagaataggtgattgtaccaacaaccagaatgtacagtgatttcagttgctcctgaaattgctcctgcacttctaaagaaatcggggaggaaaaactgctctctaattgtttcctcaggcttgtttaacagatttgagaaagggtcatccgacattgatgtttgagagtgtcctttgaaaaagagtggcaccttcaacacttttctggttttcaaataaacacacaacaccggattcaacattaatcattttctctgaaattaatttgagggtttgctgtggaatatcaagaattaaaaaaaaaatcattgattattatttttaggtttagaggatgacaaaagcatccttaacccacaaaactgtatttaaaacctgggaaaatgcacagatgataacggtatactttctgtgcatttaatatcttattttcccccaattctttcatcagcacagtaattctcaataatcctgtttgtgttgtttctggtttcttaaaaaacatacacatgggggaaagtaactcatttaagatgtgaccaaagagtacttattaaactgttttggggatttgggtttaaattgaataatgttttgtgtgtgtgcttgcacatgtgtgttgtttaaaaaaaaaaaaacaggttgctgggaagtgtgttttaactgtgagtgccgggtttcagctattagcataagaaaaaaagttttagtgcgtttgccattgtcttgaatgaagagttcagcaaagggaaggaaagccgcaaaagggtgatggtccattgagattcttctgcagccccgagctcgtcatctgcctctgaaatctgtgatcggatatcacttttatctcgcttttccattctctggcctttttcacacgttcacttttgtcaaggtttattgattatgttttcttctctacaaatctgtggaaaatttaatgaaccaaaaacagcagtgaaataaaggggactttttattcattagcacgggattgggattgattccctctttgggcagccgagggccccaggcctcctgcaggcagctagagggaggagggagggtggcccggctgcaggctgaggcggggactccacaggcctgtggcctccaggctgagcagcacgggcgcagccctgcactcctgtcccaagtgaactctgaaagcttgtccgcgatggctgtgccggttgagcctgtatgcaaccacgccgcagcccttacccgccatgtcctcctgggtcctggctcagtgggcttgggggaggtggggcggggggtgttgtttgtatttcccagacttacaaaccatttgagtgctgggccttccctgggacacagttaagtatctcccttcctccagacccagcccaaacctgtaattaagcaaagcccctgatgtgattacgctttgctgactcggctgggtttggagccattccctctaggaaacagggtgaactcttgctcttcccagaggtttcctgggcagcttgtggtgcacctctattgtacacatgtccgcctgtccccctcctttggctctcttcctctcccttcagctatccgtccgtcctttctgtctttttctttctccttcccctttctctctcttctgtcctgcccccaccccctcttctctctgggtctctcctttctctccctctccgttctctctccccttctcctttcttctctttccctccgtttccccctcctccgtttcctccgccttctctctccctctcttttctgtcttttctcatcttttcccatctttccctcccgttccctccgcctcctccccgcccccgccgtctggaccttcctctccctccgcgccggcttttccgccacgcggagcgctggctggcgaggccgcgtgtccgagcggcgccgaccgtgccgcggccgggggacattccgtgccccgagcgccccgggcccgcggctgcggccctcccacctgcgcgccggcctggtttgcagctcccaaacaatggccacattgtcgcagccgcacaccggccgccgccggcgagtggcgggaggccggactctgctcgtggcgagtcgggaagaaagccaacgggccaggtccccacagccgcgcccggagcgcgcgagcggctcccacccgggaagggcgcgggttccgaggggcgccccgggtcttcctcgaccccgtttcccattggcctgccctcttgcccgcttccccaggaggggcttccagttgcctttacagctggcgaagtgaatgagagcactccacgggagccgggaagagagaggccccgtgaccaaacttttggtggcgtctgaaactttttctgtaaggcatctgcagacagtaatcactaaggccgccttctgcccttgtccactcccggcgacaggaaaggaagggcggtcctctcttccattcgtcttgacctgtagggattcgaaacctcttagcgctcagaaaaaagatctttgaatgcctgatgttaaaagagcgtccctgggtccaagatagccccttcagcagacgcttagcaatgcttctttgtgtgctggacaatgcagtaagtcagccagacttttgagccacatttataaggaactgtaagggccgctcaagtacacttgtgctaagttgaattgattgaaatttaatggcggttagtggcgatgaatggtaatgattttccagcgtatctttggcatacttgacattaataactggagtgtgtgtgtacgcacgccgagagcccgccacacacgtgaggccgtagcattattcattttccgaggtgccagtcctttctctcctcaaatccttttccatctcaccataattcagttgttaggatgactttaaaaaaaaaggaaagagggaaagagaaaaatctttctccattgagcacgtacatcatgtcaacgtaattttgagctcatgatttcttttcaattcctacataaatcagcttctaatatatagaatgtgacgaatttgttttagctgccatcatgaattaatgttatgcaaatagaagctgtgcaggtgaaatgatttacttaataatttcaacttctaatatttaaactcattcattatgttggagttaaaaaaagcaagtccatatttttaaacctcagatggggagattagtatgcaaatatttgcagtgcagcaacccttgatgaccagaaaatagctcttaatttgttgattctctgggaatctgcagctcaccataccaagtggcctaaggagcaggggaaagaagacttaccaagttttatctgggggaggacacaaatgcatttacataattccatcgtgaccatcaatgtaccatatccagtgggactgaactctctctgctttggggaccaaggaaggcttcccatttgaatttgtcttgaagaataactgtaactgccaggtagagaagggtaaagggctctgatgtgccgcctccccgctccccttcctgcttctttgtcctttgtcctttgctagttaagaccatcttaacactgtaattccaggatttggggaggctgaggtgggaggattgctggagttcaggagttcgaggccagcctgggcaacatagcgataccctgtctctacaaaaaaataaaaataaaaaaagaaatcatcttaagagccagtcattaaataccggcctatgaaggtgaccctggtgtagaaagttgggccagaggactacccagataactgttaggaagactttcttatatataccatccttcccggctgtttccctctggaagaagctaaggaagagcacaagagtgatggatggctgcaatataaagataattagcccgaaccccttggagttatccccagggactgggagacccagtcactcaatagctgggtgaccctgtgcaagttgcttcgcctatctctgggaagggggcggggcttggtagatgtcatctctcaggtcctcccagcttcaaaaccctctgagctagcacaccctgcccactggacagccatctctaagagtcaagacagcgggtagggtgggaagatcagagtctggagaaagggaaggtcttgggtaccccctggggagagttgggtgcctgtcaaggaatatgtcctgcctctccttgctggccactcttcttagccagccgctgtgctcaggtacctctgggatgtggtcacagggtcagtgtaaatgggagtggccttggggacattggtagagagcggaagcctgtgatggtcttttcagactttcctcgaggctgaagatcagtgaaggaagggctgacacataaatttgtcttggatctctgaagatgataagggtggagttttgacttcacttctcaaaaaattgaggtcgttgcagtctgatgacaggttgaaggcacatcactcagacgtttctgcagacagctgtgggttgtgctgtcatgatacattgtgtgtgtccaggcagtgacagtatatttagggctggccctcgctgtctgtggagatcaaggtgaggggacatctctggtgctcttgggcttgagagaatgcatatgttgccttgtttatgtactgaaagaaaaattggactcagtagctactctgttacttccatacttttcaggtatgtgaatcaatagttggaacaggattgtagagtttgaatgtaattcaggtacattcatctaccgaagatgtggtacataatatagtaatttacatacacagtatagtatgttagattacccttcctgctgttcagtgtgaatgagggatgtgcgacatgtatatttatgctgatagacatttatatggctaaaactttaactaccagattcctttagaattagatttttgttcttctcctaaaatgtgcttgtacccaagaacaagaaattaagaggcacatctgagaataaggctgcaaaggtctctaggtggggttcatgggcctcctggatgagattcaggtgggaagcttgttaaatattgcagaatcttaggttccccagggagaacccattgaatgagaattcctgcagagtgggtccaggaatctgcattttatccaggatttttagggtggggtgatgaggaataatgtctttttactatgatgtccctcagatctgggacagtccaggaatggattttcagccaattgcagcacttgcagctgcctggacagctgttgcagcaaggaaactagctgaaaacagaggtgcttctgctccaaaacagctcttagaagtaggctctagagcagggtctctctttcacaggacagtagctgagactataaggtggctctggtggttacttgcttttactggcccccaagagaaacaagagagtatattaagttaacatgttggtttatgtgctgtaggttctgtcccaagtgtccctgggatgcctcctttctttttccatgtaaggaactgcagcgccatcaggatgctttgtggctgaagtgggaccaatttggcattggacagtttgagtaggtcttttggaagtttgacccacacttaggtttggttgaagggcctaccttgtggacacctttatggtccctaagaaaagtaggaaggagacagattgtccaataggggtgaagttgcagaagaggatgctgtgtggtggcgtcaggcctgggagctggaaggagcctgccctgagggtgagcagagccctcactcaagattaggggcctaggaacagacttttcctttcactactgtcctgcaggccttggagacctgggctcttccacacccgcagctgtgaccatgtggggtggcttctggggctttgattcatacagttttgcactgcagacttcatttgcttgatgctaatgttacaagtgcacctgggccaggacttcaagagtgcatggaagaacacactggaaacatttgaaattgtgatgtgggtgggtcctcatccaccctgcagctggttcacctggtggccatgtggtgggatttgctggtctgaagaggctcaggattccttctgtccacatttttgcagttcttctgcgcaggcagatatgtacagtagattgcaggctcttgctggcactgggggccccgtgagaagggaggtgggatgtgggctggtgccatttccatctcctctgggtctctggtgtgcaagacctgggtgccacatccttctgcaggtgcaaccctcagcccctgggcccgtaggacctggtgcccagcccatctgttttaccaagagcagcagaggccccatgatccagtgcgttgcttcttcagtgccatctctctccgtcttcaaggggccaccttgcatgggtggtcaggaaaagctggagcagggctcagcttacaaaagactgatagctcctttggaagcctgggttagctgggcttctgggtcccaagcctgccctggtggtggaagtcctgttctcatgcttacagtgattgtagcagtgagaagcgaagctcccagaccagtgcctggccgtgggcatcagtaaggcagccttgtggagcacctgtgtccacctcgagctgcacccccccagaagctgcccagccacctgcccagccagaaagtagaaggcctaagagaggcctgggtctctctgctccccggccaaccctcctcccctgtgggtgcctctggttttcccagtggcccagagccatgcctatccctctttcttctgcttctgttttcttgggttttcctttatttaagtttgaagatctatctctttgctgggctctggtctctgtattcaaggtctggactctggtttagcacttggattcaagcaaacctctttctcctgatgtaaaaatactaaaaaaagccgcaaaacattatttgccccccaagatcttaaaactaagacatgcctttttactgaaaatgtaaaataaggagaagcagaaaagagaaatttggttaaatttcctgctagtctctgttttttaatataaaattttttttgctctatcctttcttacaaaattgaggttacattaatacagtcttgtaactccttatttatttaacattatatcatggagatctctcatgttattaataattttattagtgtgatttttattggctacataatatccctttgtctgcctctctcgtattttattttatcatccttataccattgggcatttagactgttcctagtttttgttattatagataatactgggatagacatccttgtgtcggaatgtttacctgaaattctgtttccttaaatagattcccaaaagtggaataacttagctagaatatttggacagctgtttttcaggtccttgttaggcgttaatggagttccagcagtatgtacctagctttggggaagagatgggaggtgctagctagaggttttcagaacagctatgcacaaatcaatgtaagacaattattttgtgccttctgcatgctcagacacacacaagccacttgcaaaatagggcctcaatttgcagatgggtaagcagggcctcagagacactggcggatctccatgttcacctgggcagtaggggcagagctctgagcggaggcaggtttgctgacccccaagccaggaccctctcccagagttggctcctgagggctgccctgggagcagctggtttgcctcaaacaagggctatagcactgatttctcaactgggcagtgtctccagggggcatttgacctgtctggagacatttttggttgtcacaacaaggggaatgctattggtatttagtgggtagaggccagggatgctgctgaacatcctgtaaaccacaaggcagcccatgacaaagaattttcagcccaaatgtcagcagtgctgctctccagaaaccctgagtgggggcacatcataggggacccctcccctattgacacaacaggactctgccactggggcttcccagggactctgacagtggggctgtcaaagcaggcagcagtactttattcaaacctagttctcacaccaggctggaaatcttaaaccttttctgtgccttgaatttgaaacagtgtggcaggtgccatcaagaggaattccttgtgtaatccatcagtcaatcagccagtacttactggaacatctgttatgtgcccggcacttattaagctcacggctgtaggcacaccttgctaacttggttacggagccggcagtctccgaaatcccagcaggtttctcaaatgtgcgtattcctccttatcccccttgcctaggacggagcctactttaggaaaggcatgatctggaaaggcatcatgggaatattggccaggagcaggaattgccccaaactcttttccccaagaccctggataggtctgttttcctggctccaggctgacaaatttccacttcacaatgaattttgttttgagctatgcttgcagctactagtcagagaatgcaaagtcctgtcagtataatgaaaagccccagagtgaaggccttgagcagtggctcttttaattaaccagtttgcctgagcagtttggaaggcttcctcaaagagagggccagactgggtcttccaggaggaggactttgccagcagaggggttggggaaggaagggcaatctgggcagaggacctcatagggcaagtgctggacagggtgtggcatttctggggcctctggtatgtgggagagtcagcgtggggttgcctccaaggggtggctttgtggtccccccggatgactcctctgcctatccatggtttagcttcaggtcatgggacataaatgtgcagaggcccaggttctttccgaggctggaacatttgggatcctgatgtgcagcaatgagattgatcatcagctttgccttctcattctccccgtcttgggtttgggctcagtttctaaagttatatctttctgtctggtgggtggtggttctcagaatgctctctactatgatccccagtcaagattataggttgagattaagattatagtgatcttgcattctccatccatccatccatccatccatccatccatccatcctcaatccatcatcatccaactatccaaccacccattcatccatccatctacccatccatccatccatccatccttccacccatccatccatcatacattcattgactgcaaggattttaaaggcctttgctgttggtctttggtgtacccttcctccccatccatgaagccaagggtcatgtcctctgtaaagtatttcctaccacagccctaggctctcacttgtctctgggatttcccttgcttataacactcattaatactgccttgccattgtctgtttatttgtgcttaacacgtgtttgtttataaatgaattttgggaaatgtttcaagggaagaaaatggcattttcccattttctttgacatctctcttaaaaaatataagttaaccaggtagtctccagattgacctccttggtttgagaaagcaagcacaattattaattagtgattagttttaatatagtagagctgtattttaaaaaaaaaatctaagcatgtggtatagttcatttggaccccacacataatctctttgtacaatactcttatgccctttggagagatcttaggtgggaggcaggatgttttggtggatgaggaattggaaagttggtgagataagcagagttccaggctggctttgcctgtgagttaacatgagacctcaggcggcaggccattgtgcctctctgggtctccacttgttcatttctcaggacagatcttttctaggactctgtaagctatgacagtcagagcctgggatcataattgttctgttcgtgattacagagggttgtatttggagtttttagactcattgacagtcatctcactgatgtacttgaataaggcagcagcccctgaccttagtagtccctcgggaagtgcacatgtctttaaatgctgttgcatcatctcaagaggggggccttggagaccaagtgccgcatcagcccccaccactaggtataggacatgtgtcatgcagtggtgacagcctgatgcagtcagtattatcactagcattttacagatgccactgagactttgtggttttattggagttgctctaagtcccaaagatagaacatcaacgtcacagctccctctcctccctggggtctgtttctcatccgccaggatatccacagggacatgagcctctgcctcatcctctgaggggagggcagggcgcaggctttgtctcagcagagacatcctctgcctgggtggcccctcgtgtccctgtcgtgagcctcagcccctcccactccaggaggaggtacactcattccttctgagtccccagctctctgagggagggctgaggctagttctttcccaggctagctcaccacccccttttgggggcaagtttgggtgctgcacttccgcataagccagcagggcatcagtttggccccagagccagtgctcccccgagggggactgtccagctgtggcatggccattgggaagggacaggtgcatcagggaagattctgtggagcaaggggctcagagcaggcactggagatagactgcaaatccagctctggcctgccattttctcatctgtaaaatgaggataactctaagacccatctcaaagggttagaggtaaaagagttagtatgagacaattacctggcgcatagtaagcacacagtacatcttggttgttattattaaaaaggcagtctgtgtgggcacgatatatttggcagctaccactctactgactcatttgggctctcgttaggcaaagtcctcattctcatttagcacgcgctgctggtttacaccatagttcccatcttgctgggccttaacaacaaaagacatcctggcagggagcagagcctgcccttcccagaacttggatacttctgtgctcttttctgtggccaggaaaggggtccgatgtttaccagggagcacttctaagatgtgcctggtacagcattttacctttccaccttcatgctgctggaggctgcactgggccccagggggatgccccggtaccgcctgcctctaccttgctctgcagaggcctctccaaagcgggccttccagccagatccctccggaagccaggatggtggcccccaactctgctccagctgtggagactgttgccggttggaaaaggtacacgtggcctcctgagggtactgactgtgtggctcccacagggccagccccctgtagctactcaatgtgaattctgaaggacaggacagctggaaagggccccggaaggatcccttgcccaaaattggccttttcccatctttaccccaacttagggatcatgatggcccaaatactaaaataacatttgttcttctagatttttttttctattttatcttttgggcctgtttaattctagtctttttttcctgtgaatatttatcctttccaccgttctccccttccccccaaactttacagattttagattgtatggtttacagttttgcatctcgtactttttacttaatactttttgataagcatttgtcgtagccctgacaaaatgattactctattttggacataaaagccaatttttctttatcataagtaattattctccaaacacgcttatatataaatactctgagattattagtgtgcataactttctcttttaaataaaagcagatcctttataaaataattatgagaaaattcttgaaaagaggaaaagaaggcattctggactccaggcccacgttggtgttctctgtgggtaatgccctagcatcttggtgagttccttctgggcctttttctgtttatgtttatgaataccttctggactcatgggatcatagcacacatattgttttgcaatcttcacactgtattagtgtgcatgttttcccacagatatgtctctgaccacattctttgaatacatttccagaggtagaattcttgatcaaaggtgagatcatgtttaaggctctttattcatatttctgggcaagtgattaaaaatgtaactacccaggggaaggcagcccatgaagccagtttctttctgatgcaaaagtaataaagatacaaaaggttaaacctgcagaaatgtatagtgttgagtgagcacgacccccactagagagaacggctgatagtgagtatgcctgtgtctccatttctctattgatatagaccagtgttttattattatcatttatttttacaccagtgggatcatactactgcagtgtttggcagtttgctttctttgtggtcatttagcaatatgtcttggcattctatccacgtgtgtacatgtatgtatatgtgtgtagatcatcttcattcactttatttctcacctatctttaatttttttttttttttttttgagacggagtctctgtctgttgcccaggctggagtgcagtggcgtgatcttggctcactacaaactctgcctccctggttcaagctattctcctgcctcaacctcccgagtagctggaccacaggcatctgccacgatgctcggctaactttttgtatttttagtagagatgggctttcaccatgttagccaggatagtctcaatctcctgacctcgtgatccgcccacctcggcctcctaaagtgctgggattacaggcgtgagccaccgcacctggccctatctttaatttttatttatacttatttattgaatagtaatatacctacatggttaataggttcagaaagcatgaaggttatacatacattataaagttttcgtaccactgccgtagcccagccacccaaaacctctcaagaatgctagttttttgtgtatccttcctgaaataagttttgtgtaagtggcatggaaatgagtatatataatcttttttacttttttgtacacaaatggaagcatattttacagcctgtattggaacttgcctttttcactcaccttttcctgtgagcacataaacagcttcccattctgtgtgtctgggcgggataccactgtatggttataccatcggttatttagtagctattgatgaacatttgccactataaacaaggttgcattgaataaccttatgtcatttcacatacatgaatatctctttgtagataaattcctagaacttctgggtgtaaaacttcggggtataagggtgggtgttttttttttctgtacgtatttttttttttttttttttgagacagagtctcgctctgttgcccagtctggagggtgcagtggcacgatctcagctcactgcaacttctgcctcctggttcaagggattctcgtgcctcagcctcccaagtagctgggattataggcgtccgccaccacgcccagctaatttttgtattttcagtagagacagggtttcgccatgttggccaggctagtttcaaactcgtgacttcaggtgatctacctgcgtcgacctctgaaagtgctgggattacaggcgtgagccactgtgcctggcctctctacggattttaatctttgcaatttgatagaagaaaaaatctggttgtttcaattttcattttttagcatcagtaatattaaatatttaaatactttattttatgttgtattttcctgtgtgtttgttagttgcttgtgtttcttagcaatttttccgtcagtgtctttgttttttcttaaagatttgtacgtttatcataaattaaagctatttccaggctgggcgcggtggctcaagcctgtaatcccagcactttggaaggccgaggcgggcggatcaggaggtcaggagatcaagaccatcctggctaacacggtgaaaccccgtctctactaaaaatacaaaaaattagccgggcgaggtggcgggcgcctgcagtcttggctactcgggaggccgaggcaggagaatggcggaaacccgggaggcggagcttgcagtgatcttggctcacgcggtgagccgagatcgcgccactgcactccagcctgggcgacagagggagactccatctcaaaaaaaaaaaaaaaaacaactatttcctctgcttctcacatgttacaaacatttttttcttgtgccatctctattaaaattgtgtttatgtttatagatttaggggtacgagtgccgtgtgttatgtggatatattgcgtagtggtaaagtctgggattttagtgtaaccatcaccgtatagggtacattataaccatttggtaatttctcataagggtgggtgtttttgtactttagacagatattggtaaatcactttccatagaagtttacactcccaccagcaacgtacgagagtgcttatctgcccatatccacatcaacagggagtgttatcaaacttgtcgatccttgccaatctgatagttggaagagaaactatgtttcagcggagtttttttttaaaaatgtacagtttgataaagtttgactcgtgtgtgcaaaccatcaccataatcaagataatggacatatccatcatccgcagaagtttcctcatgcccctctgtaatctgtccccccaccccaccccctggccttccctggcaaccactgatctgcttcctgtcattttccagagcttataaaagtggaaccatacaggatgtcctcatttttgtctggcttctttcaccacaattattttggaattcatccatgttgctgcacgtatcaatagtttattcatttttattgctgagtagtagttcatcatacggatatatcataatttgtttgtccagatgcctgttgatggatatttaggttgtttccagttttgggctattacaagtgaggttgctttgaacatttctgtataagtcattgtatgcgcatgtgctttccttttctcttgggtaaacatcgaggagtagaatgcctggatcataggtaggtgtgtctgggccagagggttggtatatttaaccattttttctttttttttttttttaagacagagtttcactcttgttgcccaggctggagtgcaatggcgcaatcttggctcactgcagtctccgcctccgggtgcaaaggattctcctgcctcagcctcccaagtagctgggattatagacgcccaccaccatgcccagctaatttttgtatttttagtagagacgggtttcaccatgttggccaggccagtcttgaactcctgacctcaaatggtctacccgccttggcctcccaaagtgctgggattgcaggcatgagacaccacacacagcctatttaactttttaagtaaccacaaaactgtttaataaagcagctgtaccattttatattcccaccaatggtatttgaaagttccattcctaccacatcctaggtaatacttgcaatagttagtcttttgaattttagccacttttataggtgtatagtgatatattattgtggttttaacttgcattttcttaatgactagtgatgtgattcttttggtgtgctttattgccacctgtatattgtctctagtgaaaagtctaagaaaatcttttgctcaattttttttttaacatgggttggtggtttccttattgcttagttttgagaattctttatatattttggatagaagtcttttgcagatatcccagcctgtggcttatcttttcattttcctaacagtgtcttttgtagactaaaggattttagttttgatgaactccagtttgtcaaatttttcttgtatatatcatgcatttggaatttcatctaagaaatatttgcctaaattgaagtcacaaggattttctcttatgttttcttttaagaagtattaaagttttaggttttaaatttaatatatgatatatattaaattaagctaatatttgtatataatacaaagtatgtatcaaagttcttttaaaaaattgttccagccccattcgttgaaaagattattctgtccgcatcaacttgcctttgcacctttgtaaaaaaatctgcttcccatatatgtgtgggcctattctggactttctgttctattcttttgatctatttgtgtacattgacagtgacagcacactttcttggttattgtagctttataacaagtcttgaagtcaggtagcttagctctctaagtattctttttctttttcagagtttgcattctaggtcctttgcattttcatatgaattttggaatcatcttggcaatctctccaaaaaccctgcttttaagattttgattgagattgtggtaaatgtagatgtatttggagagaattgacatcttaataatattgagtaatctggctcatgaacgaggtatgtccttccatttatttacatcttcttcatattctcctagcaatgttttataacttttagtgtacaagtactgtacatcttttttcagatttattctaagatattttatgtttttgatactgttgtgttattttaaaatttcaatttgctaatattaaagaatataattggtttatttatattgcttttatatcctgctttttgtagattttgtcagattttatacatgtgtttatgtcatcagtgaatacagatagttttacttcttcctttataatctgaattccttttatttagttttttgcctttcactggctagaacctgcagtacaatgttgcctagaggtagtgagagttcttattcttatcttgtttttgatcttagattggataacataataaatttcattagttggttttcaactgttaaaacagttctttaaaatttcttttgtgtattttgaagctctgttattaggtgcatagatgtttaggattgtcatggtatcagatgactttctttatcatctctactaatatcctttgttctggctgcttttatgattttctgtgggtttgtagtttttatcaaatttggaaaatttttagcttttatgtctttaaatatttcttcttcctatcctctatgttctgtttctcctttggggactccagttacatgtatattaggcagcttgaagttatcccacagctcatatgctcttttttaatgttttattctgtttataataccggatagtttttgttgctatttcttcaagtttacagatcttttttcttcaatgtctaatctaccaccaattccatctagtgatttttcatctctagaagtttgattgggtcgttttgtatcttccatgtctccacttaactctttggacacaggaattcatttataactactgttttcatgctctcatctgcgaattctaacatttgtacctgctctggctcagttttgattgatgtttattttcctcatgtacttttctgcttttttttttttttggcatgtctggtaatctttgctagatgctagaatattgtaagttttatcttattggatgttgaatatttttgtcttactataaatattcttgagctttcttctaggatatgattcatttacttgcaaagtttaatttttttagctttgttagatgggaccagagcctagggctaattattccttgctattgaggtaaaatccttcagagttctctacccaaggctgtgtgacttttgaggttttccagtctggctggtgggcataggcactggccttgtctacactgggcactcttccctctcatcctctcagctggatcttttcctggccttggggcaagaacagtatgtgctgattctattctgcaatgctccagggggaccctctgcaagttcaccaatgttccccttctgttcagctcttccactggtctggtgttctgccatgcaaaacccttcttaccctggtctccctcctctccaactccatctccatctccttaactcaggaatccaccaagctctgcctggttacccctccctgtgccgtggcctggaaacactctctggaaaggaagctggggcaggctaaggctcacctctttggttttcgttccttcattgcctgatgttcattgtcctgaaaagccattgtttccatggttttgctggttatttgatggttttgggagggaggttacatctggtccctgttattccatcttggccgaagcagagagctcaccttgcacttttctcactagcagggcctttctgattttaagtggtgtgagtggtccactgtaaggatagtcctcaccctgatgtgtttaagacctgacgggagaggctggtgtggccagcgggtgtgaggagggatggctggggagaggcctgaagctgacaggggcagggacatctcaccacttatccgggccgcctggccttgagggactaggcctcacagaacatctgtgtgggctggaggtttgcattttactcctagcaccacacacaatctcagcagcttttctgagggctttgtgcacagctgagcgtgggagctgcatcagggcagaaagccccagagtgctcaggcttgccagcaaaggcactcttccatgatgctgtcatggggagaggggaaagcggaagtgggaagggcctatgtgaatggtgctggctgggaggcctggcttcctccccctgaccgggcctctcagacctggctgcaggaccgaggaccctctcttgtgagggagtgctggggcctaggcacagatgttcagcctgcgcccctggcctgcctacatacctaggagaggggaagccacggccaggcccaaggcctagacccagggctccctataacgtctgagctcagctacacagtggaaaatggaaaatatctgctcggcctgcagcttcgggcggggtggctgtaaatcatccaggaggctgtgagagctgcccttgggcctccttggcttgcgggtgagggccgtgggtgggccctggggagcccaccatccaaaggtcaggccaggccagccgtgggagagacagagtgagggtcagcgggccccagagactggccactcctaccatctcgttgcacagaaggggaggggcagtggtggtgacttttccagggacatacagcctgatcaaggctgaggtgcagctggccttcctctcccctctggaggaagtggacacgatgactgggggccaggccctttctgtgcccaatcctgcatgatcttccctgcaccctcccccacccccacactggcaggtttccttttgctcatggagctgtggttggccatgtgaggcctcatgagcaaatgcagcagcagagctggtctgagaatgtaggaagaaacagactcagtttctcttacactctcactctgtcaacacagaaaacatgtgtgaccaaatgtgtgggggtttttctccatacccacggcaagcaagcacttctgccgtgaataccagctaggtgtcctccaattcaattcagttttgaccctgtctacctgcagacagcatcagatcccacaggttgagagctcagtcccacaagaccgccccacatctgtggcatcccacagatgccagtctcaagtacaggttcttcaactacctgtgcttctgaccaaccagctataaatctgggttcccatgccgccttccttgggtttgattaatgtgctagaacagctcacagaactcgggaaatacttctgtttgctggcttattgtaaagaatattacaaaggataaaggtaaagagatgcacagggtgaggcatggggggtggtgcagagcctccatgcccttttgggtgcactacctgttaggaaccatgtgctcagctatctctggaagctcctgaacctagtccttttgggtttttatggaggcttcattacttatgcatgactgattaaaccgttggccattggtgatcaacttaaccttcagcccctgtccccgcccccgaggttggaggtagggctgaaaagtcctaaccctctcttctgccttggattttcaggtgaccggcttccatcctgaaactacctagggcctacctagttacagtcaactcatcagcatacaaaaagacacccatttctctggagattccaaaggttttatgccaggaaacaggaggaagactaaatatgtattttacaaaatatatattttacactatcacagctggacagttaagcctgtgtgtcctcaggtgagagccctgggggagctcttggatgagggaggggctttagccctggggctgccccttgtgagattctccagtagcatcccccggcctccctccctgcagtgttgggtaaacctcccaggggcagggtgatgggccagctctgttgctccaggggaggccctggcccccgtgggcctcagttcctgtctctgtctgatgaatgggatgtgttagatagtctggggcccatcccaactgtacaacttctcggaggctctccctttttcctgggatataggtcctcctagggatgccaggccagtggagtggtcttatgtggggggtccaaggaggtctggggcctcccaggtgccatcgctgtgcttttgagggaaaactgaaagtctgaaccttcccaggactggaagggacaagtgatttcccaggaagtggaggcagggtggacccttccccaggcctggagtgacttctggaggttgtgttaggagatttgggggactcttcccctttggcacttgtatgtagagacatatgtttagatgtttctggggaggtgaccacatttgaatcatcacctgagctccttggtcatttgtctcagaccagggatgcagcgtccccctgtctgcctgcccgcatgcttggtgccactgagccttgcttggttagctcttggaccacagaagtcaatcttttccagtggctcaggcctcgtctctgtctcttttggctcttttttctcatgcccctaagttcggtggtgtctgcctccttgcaaaaatcaaaacaaaactgtcataatgttttcaggtccttgtggaatgccaccctttaattcctcttcattaggcatgcttttctcctccaagcctgtcccgagaaggttctcctgaccctgaacgccctcttgcgcaatcctgctgggcagcccagtgactgtgaggtctgctgaggtgggccttgtcctgcacaggaaaagcagggtgggaaggagagcagagtggctgggcctggatgcaccttggggttgctgcagtgaacgctgtggccagacatttctttccatctatggctggtttggatcttggtgtagttttacaggttttcaaaataaaggagaatgaggtggcaggaaaaagacaggtggctagggacgaagattaccttgtttaccagactccactggctgcattcaggctagaatctgggctacatgggtaaacttggggcttgacccagggatggggacatatgggctgggtggggacatgagtggacctgagtggagagaagaaccgggaaagcagccatgggcttgttgagatcccagagcccaggaggtgagaccaaggattcccaccgcccagcccaggaggtgagaccaaggattctcacagcccagcccagtgggtgaggccaagcattcttatggcccagcccagggggtggctgcttctctccctgttcttttctccccacctcagattggctctagacaaggtggacagaggaatttgcaactggaacccagagggggtgtgtgtgcagaggtggagggcgtagtgggatagagagggctaggaggagtgtggaggcagaggcagaagggtctggggggtcgggggttgggagagcacttagtcccagcccgggagagccacctcccctgcctccctcaagctgccggcccgttgtttgctcctccagcttcctgcctgccccacggtgctgggaaggagcagcttgtgccattccaggatgccaggcccttctctccccagggctctgtgttgctccagtgccaaggacagctttcttggtgtatggcttggggcagggacaggggctctggggaggcagtgattgcttgtggggaggttctgcaccctcttggtccttagccagagggagcagcctccagaaaagggttattccccttctgcaggggcaaattagaacattaggcaaaagtacagagtgagttcccagtgccgctttgcttcagcacagctgatggcagacattcagataatgagatgcacccacggagccgggcagttctggtgccacactctgctgggggcacagggaagtggctgccacccatacccagggacataatgagaccgagtagcccaagctggtggcagtcatggcctctaatgatgggtctccggcttaggggtttctactggggcagggtccctggctctgggggatggatgggcctgaggctggcctttgcaaggggtcagagcttgctagggactttgcctgtgtttctcattgagtgacctcagcacctaacttgcatggtggttcctgctggtagacctgtttcagagatgaaaaaacggaggtgccacatccttaaggttcccatctgggaccacagagctgtaagcctgcccgctggaatttgcaggcaggttggctggtgccaaggctgggctctctccccagtaccagggtccacagctgagtgactgagacaggcaggaggagagtcacaggaaggggcaggtcccaggaaggcacaagcacacctcttccttatagctggtggggagccctgtctcatctgcaacagactcagccgttcccttcctgtgcctccgcgtctccctgagaaggtcacaggcctccccatcgagagcgtcgagggcctgcagctagtgtaggctcagcaccagcccccaggccctggcccctgtcttcgaccatcccaccatcccaccatgaaaggaaggcctgcagagacgtggctgggtctggctgccttgggggcttggcttctttccctttagtgaaggcacagggctaaggagacacctgagggcccttggttcagaagtggacagaagtggagtcctgagctgagtgttgtgaagtttcggcgctgaagggatccgaggaggaaaggcttcagtggctggggactcgagaggactttgaggccaaggttaggggttggcaggatgaagagaaggacagggctttccatatgggggaccacatgggcaaagccctgggaggctctggagcctggcatactccgactgaggggcagccctgctccctctctgtttcccactgtgctctgttgttacctggacttaatcttgggttctctgaatgtgcccttcctgcccccaccacaggccctttcttgtgcctccctctcctctgggtctgactcctatcagattgctgctatgcttttgattgattaactggctctcagatctgtgtgttttcttgacctaaaggagcccctgtccattatcagtgtttgctgaataaacgattgaatgaatgaatgagtggatggatgggtagatggatagatggaatggatggacacatttgttggattgaggggacttgaaggcctccacagtggcagggccactaggcagagaaagcctggggaagtggggataaagggaactgtctcttggcaagaatctgatccatcactgtggatgggcttgtcctgagcagcaggcttggtggcagccaagaccaggcatccagtgggtgctctggggggctcactgctgtctggcccttggggaatgctgtaggggccagctcagaaaccccgtgtgctgtgggtccactcacccactcccctgcagacagaggggcctgccttctactcacagccctctgggcagaatgacaagaagccacgccctgtagccatcgtgccctcttgccccacgcccggaagcattgccgggttctcaggaccgctttgctgaaggggcggagcatggactgggcctgccactgatgtgtctgtgggtggggctgtgaaaggcaagtcaggaccaaaaacaaaattattttcaaaggttttggggcaggatccatcaaaggagtgggttttgtcaacaagtgggccttttatgcttcccaagccagccagggctttgcgaagccagtgtgtccggggagataattgcatagccctgtggggacatctccctctaagaactttcctaccgggtcccaagaagagccacactggtgatgtgggccctccatgtcccccaggccttgtgcactgggcagaagcccccttggttctcctgcattgtcacctggacatgcctgctgactctcagggcttcagggagggtaggctctgccctgatggcactgggcacagaagaggtgccagcgaagtggcagagctgactggcgggctcgtggcgcagccggaggctgcaggggacaccttccaccgtgctggggagggaggttacaggatctcaagactgtccagaggagacccagaattcacctccaggcggtcaggagcagggtttctggttgtagcttcttgacacgcttgtgagatgtgtccccagaaatttgctaagctaggtacacttcaggtgtttctgtgaatgctttaatcttttaaaaaaaagagaacggattacttccaggtttgcctttgcatgtcaccctcacttgtatcccttacttgagtgggagtgagtgtccgggtcacagctgggtattggagggaccactggctgcagacaagcctgacttggtgtcctttgctctgtgttgtagaagggaacagggttgcccagagtttgcttttcattcccctttgcgcaggctgctgcaggtagaaagggctggggtccatgtgaatgtgggagaagccacgtgctctgtggtttttccagatgttaaaagtgcgtgttgctatttcgaagactctgaaaaatcctgaagtaaagaaactttttgcatgtttgcccagcatttctaaaattcacataacgtggaacatctgactgggaacaggaagctgttgtgtcccagagctctgtgcttgtctaataaaaggcttctgagttagctctagtgtctttgtgttagctctgcctttgtgtctcttgaggaaatggagagctgtaacattttgttcatttgttcaccgtccattcatgcagtatttgcccagcagaagtggcagaggtggtcatcactcctcttcctgtatgtggtgagcgccaccttagttccaggcaccatgactcctgccctcccttcctcctacccccttcaggaggctttccctgaacctccccctgcccctggggctgagggctcctctctgctggtcccactgtctctctagaccccagtctgggatccttgggcctctctcatgtgccctcaggggacaaaaccccacttcacaccctgagcccagtccagtcctagctgccactgggagagggcagacgggccgcctgtccttttccttgcacttctaaggacagggtctccctgggctgcacagccgatggctgactttggtggtggcctcttcatgcctttgcatgaggccaagcccggaggtatgaataagtggctaaagagcgatcaacccaggggagtcaaatgcaggaactggaggcagcaagaaggcctggtgttgggagagccggaacagagggccgccaagggagagggccagctggctttgtgcccagctgactgggcagggacctggtctgtacccaggccggggctggaagggcccctcaggatctggttcaggggtgtgcctgaacctttcccctgcctgccagtgacaccttggagctgacgccccctccatcaggacccgttagggcaggtctggggaacaggcttcagggagacaggagattctgcagggtgggatgggcccccttggcctagcaaagctctttctccgttgcagtcaggtggaggtgagaagagcccatcaggcgtctttgagaccgctgtctccttgtgtttttgaagttcgctgcctgatttccttttggcacgcgctaaggcggctgcaggagactcagggaatgagataggagatgttgatgtgaagagagaatgtggaatttacagagcagcaggaaaagcactcctcctggaattcagacagcatttgtcacagtgataacgcctgttttctaaacaaaagtccctctgtgggcaaggtctcggagacgtctggagctcttgcccagctcccctctcgcgtggctggatcgtgtttccttgcatcacgatggggagggttcggaggttcacgcggcaaggctggggctgggatgagttatccctgctgttcttcagcatgtctgcagccagctgaccctctgtgacctcgcagccttcggtccagctgtggcgcctcagtttggacacatcagtctctccaggaaatgcagcaggcaagcgcgtcacttcctgccacccagacagtgtgaagagcgtccagcataccctcgcaggccccataatgtgcccatccactggacggagagggcctcacgcccctggggctgaccctaggctccccacctgtggagggaaggtggctcctggagcattttccgggctggagaggattgtgggggaagcccttgagtagaagagtatggaggctgccctgggcagagaagaaaagtcagtggtcaggagggaccacaccatagaaatgggaaagaaaggccctcccctgatagcctgaggttctgtgttcaccagaagcaggaggaagccaggaggtggtgagagcagcggaggagcattagctctacgctcagactggcctggtggcatcctggctcttctgtttaaggtctttatgcctcagtttctgcatctgtaaactagggacataatggtgaatccttgcagggtggtttgtaggagtcactgagaaaacatgacatgagagagttgacattaaagaaaccggtggccatcatcattatattattatgtgagtagattcttaagagttcagtgaaattcctgggaaaaattccagaggctgtacttagggcagttcgctatggagggcctgttcccaggtctgcagtgtcactgggcagggaccatgacagggcagctggagagaggctggggaaaccgacaggccacacctgtaggaatgtggacacctggcttttggtccccttagctgcccagggctataatcatgcccttctcttgtggcttttgcaaatgtgaagtgcgaaattgccgggaaggcccgacagacatacagcaggctctaaccgacctctacgtaacttgttctttcctccagaggggctgggcttgcctgccttcaaggcaggagctggggccctgtggaagccacctccttgctgggagagactaggccagtcagagcctggggcccctgtggagattgccgccagcactgatcgcttttccaagggtacagctgagtgagaggccgggctcttggatgtgctgagcagggtgctgggctgggtgctggtggccggagtctggcgctgggggcgggggcgggtggcaagcatgttcagtggggatgtttttattcacgctcggcctctgaggagccaagctccctctcccagtctgccgctggtgagagggtcaaacaattatgggtctcctcatttccaagccaactgggaaattaagtcgcatctccatcagagcgctattagtaattttcaagaaagaggtaattgaaaagaaactttttaatacactcaccaaattggcacaggggcacgggagcagtgggagcatcttcccaccgtctgcctgtgccccccgctctgagaggccatgcccctctgcccagcccccactgcctcgcctgggtcaccctgccccagccacagtggcctgcgtgggctctggccccacctgggccttaacccaggcgcttgtccagcaagccggctgtgtgacccttggcaagttctttgcctgtctgtgcctcttgtcttcatctggaaaagcagacttcagtaccacttcaattcccatggacattgtgctgtgggagggagataaatctaggaagtgcaggcccctgtcacatcagaaggactcgatgcctggtggctgccaccactgccaccctcaccccccaccacagtcagtgctgctgatactcctcagagttcagttcatggctgtcccgacgctcctggaacctcaaatccaccccaggctcttcttccccaaactatttttactcttgtctgaagctcgagtttggcatattttaaaaattaaaagctgcagcatctaccctggaatagcagtatttctactagcactgatgatcacaggagcccgcctttacccggcgtcggctgccaggccctgtgctcagagcccctgtgcctttcccattcgatcttcacagctgccctatgcggtgggcggacttatccccgtctcagaggaagcactgagccagagaggagaagcgccctcagagctggggttcctggcgaggccactgagctctgcttgcagggactttccatgggaaggtgggctactgtgggtgggcctgttgaactgcaggtgagaaactgttttctgtccagctggcctgcaggctgagagcaggtggagaccacaaaacttgcatctggcccgctgctgggaacagaaggggctccgtctacagagtgacttgttgcacaatgaggggccattctccaacgcctttggcatgacctgggcactctgcgaccctctgagcttgtctcctcaactatggaagggaggtcctgttggtgcctcacagggagtctcaaagatgaaataatagtagtggcttggacagcccctcttcccctgccttgcctggctggatgagccctggaacttgctaagacttgtggtcctgctcccaggatgtcagggactgggtcagcctcctcctgcctgaaagaggccccgcccctgtgtgtgtgtgtgtgtgtgtgtgtgtgtgcgtgtgtgtgcaccctgccccactccgccccaccagaagtaggcaagttctggggatgggctctctggaagggtggtgggctggcactgtttgacagattggtggtgaacctggggagctgaccattcttttagctcttcattcattcaaccaggaactttgacagccttccccaggctggccaggccctattcctgtggcttctcagtgatgaagacttgacaagggtcctcatttgaaaacgatccaacagcaagagcatctctgacaggaagtagctccttcctcccaaagagcaccgctcacctccagaatccactctctctggagcccccacttggtgcccagcctggtggtctggcactagctcccgccgccagtgttgactgaatgaaaggacaaagctgtagatgggaggaatggaggaaaatcaggagagggctaaagcgcacaggcccctaactttttggtgagcccatggccagtgttgggcagcaagtactgtcccagtccagtgagccctttctgctgcaggatgggggattccggggctccatgggtgccggggcctgggggcatcccctgaacctcagtgccctgtgcatttagttccttctctcctggaagttgtctctgtagaaggacccctccaggccctagagacctggcccagcgctcccagctactggggagttgtccatgctcaccctaggtgacaatgagggtttaacactaggtccttctaggaaataacttacagaaggcaagctcagagtcttgcccctgcagtgctcatgcatgtgcgtgcatgcatgtacacatgtgctgtgcggctgtgtgagagcgtgtgtgtgtttgggcacatttgtgaatgtaggggtgtgtctgtgactgcttctgtgtgcatttgcttgcgtctgtatgtgagtgcatttctgagtgtgcatgtgtttgggagtgtgcgtctctgcctgtttgggagtgtgttgggaatgtgtgtctgcttgtgcatgggctttaagtgtgtggaagtttgggtgcacaaacactgtgtgtgtgtgtgcatgtgcatgtgtgggcacagcctctagaaggcagcatgactggatgggtcctggctgacaagtaggtgcctgctgcctcctgtcccctcattttggccctgcagaaggagggagctgcctgggtcatgctgactgagaggaagcctggtgctcagttctcctggccccagcccctagtgataatcactgttttcgggttgtattcagggatccaaatcacaaagaatatagcttggcggctcctagaattgaacacctcggtggccccatatgaggcttccatgttcccagcacccagctccaaacacaaacacatccactgttctccctgatggctgcctttccatcccccacccccagcctcctcctgtccaggccttgcctggctgtctcttgctggaatgcctcatctgcccccatctcctacccttccatgccctgtggtgggtccccgagcacggggcccagcttcaggacccataggggtttagctgtctgtcttcccagttggaccaggagtgcactgagggtgggagcagtgttttgtgtgtgtgtctcatcttggtgcctgatgcaggcatcaggggacccaggagctgttgctgatcactggatgacaccagggaaggtgctctgtatttgggatttgggctgccattgctggacgacagccacacgctgcctgcttcctgacagccaggaatgatgtgaggtgggacatgggtgcagtttctggcttgcctctctcgtgctctgaggtcttgggcaaggcagtgaacctcagggaccctcaatttcctcattgtgaattaagctggtagcacagagcgttgtgcagctcagggatggtcaccaatggaaagtgctcagcagcgggccaggtgcctgttgggtgttctcaaactataatgattatgtttgggctcagccatcagtgctgaccacctaccctccaggctgctgggacctggtggaaggggcctcctctgcatgcccaccacaccgtccacgcccttagactcccacctgccgagcctgagttaactctttgagctcagagcctagttatgacatccatttttgccccacttgcccaggcccagactcaccaggaatctgcattttgtctggctgcctgtggctctgtggcagcgaatcagagacttttggaaagcctgccagagtgaacctgaaaggcagccatggataccaccctggggtacgttggtgggctctgcctgtgtcctggctttgcaggatctcagccctcttcactgtgctctgcatgaggaggcgggccggcacagagagtggtggcagcagctcaggcaggacccttccctgtgtcgctcagcccattggcaggtgtccagcacgtgccgcttgggttcagcactcttctgggcccaaggaatgagagctatgctgtgcgattggggcggacacttgccttgctcctcaccagctctgtgacctcgggcaaatggcttcaggtttctgaggcttggcctccgcatctgtaaaatgactggtgaggctggctgttttccaagcgtccttcctttcaacttagagttcttgattctaaggggtcgatcaaaggccttccttctcaaagacttttgccatcttctgtgaagacagaagatgtttctgttgaaagccagtgctctgggagagtagtgtgacttagtgcggctctgactgcccttccagtcgggaggctgtgagtcattgggctggagcccagagctgtcttagggggccttctgcctgtcccagccttaggctgtctgatgcagaccttgtggccacagggtctgtgactagcagcattcagatgctcagccaagcactgagtcttctgccttccagaggggccactgggcttgctggaccaggactcctcaaagttagaaggggagtggaagccagcaaccaagtaggtggtgtggccctccccacttcctccatggccaacgcccacggtgcttgcagactgcacagtcgtattttatgcctccagtgcttggatttgtataactctctcctgactggcctccctgctgtcaggccatccttgttttcggagtgacccctgtcaaatgctatgaggtcatgctactccctgacttaaactcccattgcctaacgcacacagatggagggggatgcagggtgatggaggctgggttttgtctctgtgctagggcagtttgattgatagagattgcctggtgccctgagtgagaaggaccccaggggctgctgggagaagcactgtgattgattagcaatgcctgccttggaccaggagagggtagacagtgctggtcctgtgtgaacctcaagactggatgccattcaaattcttgggtaacccgcaaggtctcctttctctgaggagccttccctccccatctccagctccccaagactcagcaccctgttctgcaagtcactattggtcttgtgttttgtttgtttgtttccactcagcaagcctccagaggtcatagagcacacttgttttgctttctatatgggctagtgtggagcctcgcagccagggagcacaccagcatcatcaatggcagagggaatgttttaactctgagtccccaggagcaccccggctgcccactcctggctgagtgataggaaggaggcctgctgagcccttcgggcctggccataggcccagaggttcccaggtctgcctgcctgacccttggcccttgttggagaaggcggaatgaatatcttctgctgtggacaaatgttttaagagtatattcctaataattataaacaatttgtgctcaaggtaataatgtagaagttcaggaaaacatagatgaagaagaaagaagccattgaccgtggcattcttcagcagcaatgctggtaagaggcacatttccttctggggcctcttctccagcatgcagccaccgttaggacagcctcctgcatttgcaactttgcatctgggtttcaaattcttgggtaccccgcaaggtctccttcctctgaggagccttccctcccctctccttgatattttagcataaacccttcccatgttattatatcaatgtgtaaatattgctctcaatgtctgatatcccattgtgtggacatgccgtgattacttaaccagccccttatttttggccatttgcagttgttttcactattttgacagtatgtgctttcctgtgacaaacaactttgtggtgacagctcttttgaggtccctgtggagtagactgctcgaagtgtaacaagtgggtcagagtgagaactttgttaagctctgaataagtcttttgggggaaaaggggagaaagagccagtcttagagcgtaggcctgtagcatccgggcccgggtaggatatcggtgtgcctgatggtgagtggcattctgagactctgcttttctgagaggaaagccaagccctgcagtgtgagggggaagaatcccacacattatgtgtggcatcctgtcacccgcggtgacagcccaggcagggatgggaaagccgttgggggctcctcattcaggcactgcagcctgacgtgctgatgttggccttgtccctgctttcagatgccatgccggcccctgatgctgtctgcggctgccagctgtgccaggctgggcattggttggtgctgaagagggatgataggccctgcgcgtctgttgcgtgcttgggtacagtagcggcacagtatctgccctcaggtagcccccagttggctgtggggtgagggaagtgattgggccagcagaactgcatgtgcatagtcgcaggtggcaggtggcaggcagcacggccttggggctcaaagtggggcaggataatgagctcagccaggccgcttcatggagggggagatgtgcttcagcggtgttggaggctcattaggagcttgctgggttgtgcctcctggccagggggacctcacctacctacctcccttccctccctccctgcctccctccttccttccttccttccttccttccttccctccctccctccctccctccttccctccctccttccctctctccttccctctctggcttcctcccccctttcttccctcccttccatcatccactacccttcacttacaagcagcccaatttcaaggtgaggagcaggcaccccgataggatgtgaggatttagaagtgcattggaggcagtgtggatgcggccgccctgctgtctgtccagatctcaacccagagtctggctgaactgggccttccattcaccaataactagtacaagtgaaagatgctctgctgagaaatctggcagctttgggtgcatttgaggtaaagactgcatcccctccctgctgtttttgtaaataactgctttattgagatgtaattcgcgtaccataaaattcaccctcttaaagtgtacaattcactgctttttagaatattaacaaagctgaataaccaccaccactatctaaaccactatcaccacatatctaagttctacacatttttatcaccctctcaaaaaaccctatacccattagcagtcgctccccatccctggcagccactaatttactatctaagatgacaccttttcatgtgtatttatttgcacaaattcctagacaggaagtggaaaattggtaacccgtggcctggtcatcaccaggctgttttactatacaggaaaattgaaataaaacccctgttcttgacttttttgagggtttggtttactgagtcctcatccttgtgtgggaaaagctggccagaggggagcagcagctgtctgcttttgacaaggcctgtgtgctccagtttgccacagtcctcaccactccctattgccccaggcttgccagccctgctgcatgactccattggtatgggaactggcagtccttgcctgagacctttgcttcctctgaggggtgacacactgtcagctgtttgccagcctttgcaccccagatccttttctgtgatgtggccccctgcccaaagcccgggctcccatgagagcccaccagactcatgccagccttaaaatctcttttcccaagagctagtctgtgtgggtggtccaggaagcatcctccatgtccatctctacacttggaaatgctgccccttgccaggactggtcgacatagggacgtgggtatgccgggaccttgttgtcttgcccactttcctacctatcacctccccttctgtgacagctcctccactccacactaatttaagctttgtgtagatatgggcccgctcagcatttcaagccatttaacctgctgtgattgaagctgtggcaattaaattttaattgagatgcacgctgcttaagcagacacaagacagctacagctattgctaattaattttcttccgaaatgacaacatttaataattatgcttcgtgacgcgtgtgttatttatgtagcctcacctctcccggtgccgttcagtggtgtccatcaggggtagttggtggtggtgtcacgtgtgcctgctggatggcttctgatgcgaacagtgcgctaatgctccggaggtgctgagacgcccttcctggcgtttgaaagagccccccagtgcctgcctcggggtggaggcattttgctcccccatgcacctctcagcagagcgccgaagggttctcactagggagagtaccccccagagtaattaagagcccctggtttgcttagttagggaatggccttcctagttaaaaaacctgatcctccaaggcaggggagcagagcgctagagagagcctggggtctggaactctctgtggacttgggtttggaacatgagggtgggcatgctgtcagagcttcctcacctataaggtgggaaggggagtgttcccctggggggaatgtgaggctggcagattccatatgccatgtcgtacaggggcacaggggatgggcaggaggcatcagccaagtaacagcagacccggccttcccccgggctcccatccctttgtgttctgcggccctggaccccaggcctcctctaacgctctcgccctggctggcacaaatcgctttcctgggcttagcctgcccaggggctgggatggtcccatcagcaaggcagggccccagctagccctctgaactggatgctgtttttccagggatggaagctcctgagcccggaccacccccatcaggtgcctgggcaggtgagggatgagatggcaggaggcgatggcatggagcaccttctgggcactgggccttgacacatattgacacatttaatcttcgcagcaccggacatgttgttcccgctttctagatgggaaactgagggtcagagaggttgggttgcacagcttgtaagaggctctattagctttggaacccagctcctgactccttccagtctgtcagcttccaaagggaggcccagtgggctctgggatgcttggttgtgagtgaggtccagggtgtgctgagtctagcctgcctgcttgctctggcgtgtttggtggctgtgtagatgcatatttttcttctgggttcccagtagacttctagccctccctctgcctcgagccctttccttgccctagacacatttgcctgggcggtggagtggggtctgattggttgggggcatcacagtgagccttgggtggaagctggggtcatcccagtaagagggtggaatgcagggggacctcaccaagatccaggacccaggattatccctggactctggttctccagtccagccctccctgtgaggctgtgaggttagaggaagcagctgggtcaggggctgtggaggcctggggctgagccggggcagaggcatcctagccggcgttctcccaagaggagccagagggccgagtggggtcttgagggaaggctccagtgggccggggactgcctctgagccaccctgtgagtgcagcgtgtagagggcccaagggtctgcgtggggagctgtgggccaggacctctcccacctgcaaactccctcctctcacagctgggagctcctgtctccagaaggacccactgccacctccccagcagtgagaggtgggcacctgacacggggcagggggcggtgctgtcagtggagctgtgtgcacgcgtgtgtgtgagtgcatggctttttgagcatgtgcagctgattgcgtgagtgtgtgtatgatgtgagagtggatgaatgtgagagtgggaaccagcgtgtgtctttaggaacatatgactatgcgtgtgtgtgatagtgtacaagtgtgtgtaagcgtgagccagagtatgactgtgtgtgtgtgctgtgtcagttcgagtgtgtttatgtgtgagtgagggtgagagtgtgagttcctgtgagtccaaggagatgtgtgagaagccgtgtgtgagtgagtgtgggagacggagtgggcgtgtgtgggggtgaggcgtgtctgaacgagatgagggacagggaggtggtggcaccagtccctgtttccagtgccgtttgggctgcaggcttagagggtgggggcctgtgtggatatgctgacctgacatgtgtgcccacacagcctggggaggagcgcggcagggaggggcgcggcaggcaggtgcagcagcagctggaggaaagctttggggggtctctgcagacattgcctctggggggctacttgtttggagggacagtgatgagtggcccagggtctctgctgcctgagacttggccattgaggacttgcatctggggtgtagacttgggccattggatcccaggcgggggtgcagagcctagtgtggtcagagtgggagcacagaagcttggggggtctctgcagacattgcctctggggggctacttgtttggagggacagcgatgagtggcccagggtctctgctgcctgagacttggccattgaggacttgcatctggggtgtagacttgggccattgcaccccaggctggggtgcagagcccagtgtggtcagagtgggagcacggagactcactgggggtacagaagttgctgggaggccatggggggcaggcagcccccacccggctaggcccagctgtgttggtggcatcaaacacggggttggcagcgtgcagctggctcagcatggttgtgatggggcagggcttgtttttgtttggaggagggaaggtggcccagtacccactgtaaacagagctgctgccacctaactgatgagttgtgctgctgaagccttgtagcccccacagatgatggccaagaaagtggggtctgacagggctgtcctggcctcctcgctcccgattctcctccctatgttgtgagatgcccaattatttggcagccctgggcttcctggcccactcctcctcctcttcctttgtatctcagaactcgacgttagctcctcacagcgtccctcctttcctgtgactcagagtgctcccatcgtcgctcctgattcagtccctgcagctcctgccatcacccacacacagccagagaaaacaattagggggcacggtgggttacctgccgggttcctagggcaggtgatgtggcgcaggactgtgtggcggggcgtgtgaacggtgagggcaggtgctgtgcctgagttctggggcatctgagtggcaggcaggcagagcttcagattccacatgtggctggtggggtgagacggggtgaagtcaccctaggacctgtctagctgtctgtgcccagggggtatacagcaggctgggggccagtccaggtaggcagggcacagagaccttccacatggccaggtaagtgctggatggagaacctggcacacccatggcctctggcctgcttgtcttgctcctgaagctgcgacagggaagccaccaggttggcttgcaaatacaagaggctttgtaaaatatgcttccggctttgccagtggaagtgctgggttgaaccagaggaaggtgtaaccctgggttgatttggtcacttgggccaccaggcttgcccggcaaatgggattggggatgcttcaggggaaattggacaggggaaaatttgggttaagaggccccatcatggctgactcaggagccaggctctcagggaagcacaaagaaggaagagcataaacttcccctccctatatacccacacccttcccatgtaaagtaaaaaccaaggtaatatccgctgtgcactgtcatgagcccgcactgcccagagtacttacacgcatcagctcatgtgaaacatttacagacagactatcatccttccattttacagatcaggaaactgtggctcaggaggcttgagctgttttttcaaggtcccatctggaaaggccagcaggtcccattgcctcctaagacaggctgtgacatttgaaatcctgctgacgaaggatcttacaccagggtgtgtgtgagcccctggccagtgctgggcagtagggccaggacctcctgcagttcgttcctggcctaacaggcaactgaggacaggcttgcaaggtgcaggtgttgagcatggtggtgcatgacggcaaaggtgccacagagtgcacacacctgacttggagaaggaactagggtgggtctgccggtaacatggcccaagagttgggagccattgcccagagggtttggtcctaatccctgcccagcaagaggatttagactcttgtggttcagtcataataatggttgacatttactgagggctttctctgtgctaggcatgccatgtccattatctattcacagggaggaaactgaggcacagaaaagttaattaccttgcccaagggcacacagtaggttaagacagggccggggtcagacactagggcggcctgaccccctcagccttgctcctaaccactccgccatcctgcctccccgggccaggactggcagcctcgggctctgttctccttcccagcccgggagagtgcaggtctgagctgtggcagcttagagagtgtatacgtgtgtgagtgtgtgtttgtgtgtgcgtatgtgtcacgggtgtgtttgtgtttaggcaaatggggaaagaaaacaacacccgcattctttttcagccccgtagacatcactgcatggtgaaggaatgtggattcagtgcagcaggttgtgtttcttttttttttttcttcatggcacataaatacctttgggtttctcggttctcagaaaggcatctattactcaggtcttacttagcagttatcactgaagagggaagcctggagtgagcatgtgggcgggcgtgccacacacactcataacgcccccttcagctggaaggcagactccttttgaatccagatgagcagatgtcttgagaccaagaagatccacttgccgagctccagctgggggctgagagctcgccctgtcctgggagcaggcatcttcccctctttcttgcagagaagcagagaccaccatccccactgaaatatagggacccttgcccagtgtgaaaggaggaagggaggaagacagggagggaaggaggaaggaaggagagagagaagctcagcacagctccaggcagaacctgtgggagtttttccagcagcgtggggtgtgtcgtttgctccccttcccagcaggaggagggagtttccagcaggcagagtggtgtgggatgagggacatggctggtggggaggcctctggccccatggcgggtgtcctattcaatagatggtatcactgtccactacactacagacacagcagctgcagcctggagacgttaagcctgccacccgggttcccagctggtaagtggcagagccagtcctgggtcgtttccagcctggaactctggagcttgccagtctgatgcacgtttattggagatgtggttctctcctctcccagcgatgtcctgtgaaggctctttggaggctttctgtcgtatttctgagctgtgttacagcttctggacaccagtgaggtgaccccaccccacctctgtccatgaacgtcagggtcatagtcgtggcagccccagctgccctggggctgtgagctggctcacccctctgtcctgagcatccgagccctgaggcttcatcgtgtcagctcccatatctcttccactctgcatgggccctgggcataaacctttctttcaccttgctccatagtctataaaaggagacacaagctgtccctgcttctgggcctggtgggaggctgagatgagagaataggagccatgcccctggcctgcagttgctgcctggcctggcctggtcctgctgcaccctcactgcccagcactgagggccagtcctttgagtgcggggggatgaggagaaatggcctctgatagggtggtggtcataactcccaggaagaatgaggctggggcttaggggccaaacccaggggccaaaaccaggtgggcagaggcagattctcctcccttgccctgccggggtcagagcagcagccccctcttcccattctgaggcccgggatgctccccctgggactggcggagcacacagtcaacttctgagatttttcctaccctctttcgcttcgggtcaggagtcaggctcgatttatagtttctcctaatattttctctgtatttattaataagtagcattttaatggaaaaagcagaatgatgttttacattaaagaacattaccggccaggtgcggtggcttacgcctgtaatcccagcactttgggaggccgaggcgggtggatcacctgaggtcaggagtttgagaccagcctggccaacatggggaaaccccgtctctactaaaaatacaaaaattagctgagtgtggtggtgcacacctgtagtcctggctactcgggaggctgaggcaggagaatggcttgaacctgggaggcagaggttgtagtgagctgagattataccactgtactccagcctggtgacagagtgagactccatctcaaaaaaaaaaaaagaacattaccaaaaatcccagcataactcaaaatcccattattcaaacacaaatttttttcttatatactgtctcccttgtacagatagttcattttcctagttgcagttatagtgtgtatgcaattttgttttattttcacttacgtgtgatcttaaacatttctgtatttctctaagtctttacaataataacctaaaataggcacagtactgtcccgttgtctcgctacgatagcaatttattaagaactatttccctcccgttaaacatgtggggtgttgtcagggtttaatgggtgtacttaaccctgtagtgaacatcttacatgtttcttcttacctgtgacagtgtcattgaggcaggccagggacttagcaggtgttttatggcaggtggtagacttccttcagggatagctggagttctgctcttcagtgtgttttaaaaccagaaacccctgagcaggccttctttggtttaagtgccttctgtgtgtggggtgcagtactagatgtttttttgccatgaactcattcatagtaatcctggagcatcaaattgttagctccattttccatgacaagataactgaggtgtggcgaagctgagtcagttgcccacagtttgcagcaagaggctgacccaggcttcagatgcagtatgcaccactgcctctttacagcttaaggtggtgagacctccatccctgggaggatattcactcagagcctggatgacagtgcctagaatactctgggtgagggtttctcaactttggcatcatggacattctggttgcataattctctgttgtgggaactgtcctggtcactacaggatatctaccagcatccctggtctcaacccactggccaccgctggcgcaatttggagacagtcaaaaatgtctccagatattgccaaatgtcccttggtggcaaattcactcccggttgagaactgctgctgtagaggattcctgagtagaacaggaggttgactgcaggctctcttacaatccctgggacctccatgaggctcccctacctggtgggctcccttggcagactgtccccatcagtgggccattgattggaaagacttgttggggaggccatcgaaaggagagggggaaggagcaagcagcacactgcaaagagtcatgggatgcaggctcaggagaaagcctggagcacctcttccatgctcagacccaaatttggggcacacagctttacaataatcagctctggggcaggggaactggctcccagtaatgaccttgcctagcagcctcatgaccaagagacacctaaacctgtgacctcctctgcagcttcctgccgtcttggagggctctctaggaagtctcatgtggcaccctggcttcccatatgggctggggacatccttgagtatctttccagggacagtcctggccaaggaacccagagccaagcccacctgtggcacctggtctcacaaagccaggccacagtgggggctggcagggagaccatgattggatttgcaggctccgtgtagactgggctttaaagagcgttctcatttcctctccggaagccttcaaaaggccacgggaacaaaagaggcttgattgattgtgtcttggagagagtcatcgaaaggagagggggaagagcaagcagcacacggcaaaggcacttaattctgcacacagtgtcatgccaagaaaccacgaagtgcaggaacaagcaggagacattttccttttatcagtagggtgtgtccttagcggtaacagccagggacagctggcagcacagagtttttggcaccttgctttcctcctcctcctccctccatccctctccatactatccacgttgatttaagagaagggaactttttatatgaaaaccacttaaagtctgatcttattccagggcagtttgcatttcaatcggttgctcttgaaaactagcaagcttcaaagaagtgactgtccagtggtagaatttcaggtggggagtcagagtgatttttgtttagccaatgagatctgactggcaccttccaagataccagcgacgagctaggctgcggcttcggcttcgtgtgaggctctctggggtcagttaaacatcccgttaccagctgtctactgggtggcagccactgggggacatggtgtgcgggggcaatccaggagacagctgactttagaacactgggttcactctgatggccctcactcatggcatgcttactggatgccaactgtgtgccaggggcctgggaatgaaagtcaaatatctgagccatccagtggaacaggcagtgaagcacactgtagaagcttcacccagtgctgtgctgtgggtctcccaggctaataaggggccatgtgggagcaccaggcccttgcctggggcaggagggctgggacacgtgtgctgggtggaagagatcccagccttagctcttaggagttcatcagacaggtgttttttgaaggggaagggcatgaatgcaaaggcctgacaggcagtgtctgggggttgcaggcttctagaaataacataaagggcgagtcctgagttggtggcaagtgaggctgagggggcagggagggcacaggccttgggggttttgggggcccagataaggagtttgaatgtcattctgcagacagtggggagtcccgaggggtaagcacacccttccagtctgccggacacttgacttccaggactcagagctacaggcttccatgcttgccctgcctcctgctcgccccccagacacagcctccatctgctgtggtcctctctgctttagcaggcctttctggaccggaactgttcttcctttgaaaatgctcactcatccctgcctccaggaaaccttccttgactccctcaggttagcaagactggtagccccccagagcttatccctgctaggaggcttattctgggttggcacggcctgtttcctctgatgccggtctccccaccccacacctggactggaagctctggggcggtagtactgtgtttccctcacttctgtggtcaaggatggagactcaagattggcacacagtaggccctcaggaaacctgtgccacccaaataaagaacgtcgagcttgtctcaagtcacggagctggtcaaaccctcctggcctccttgagccggcgcatgtccaggctgcagcagaccacattattggatccgggtcccagacacctggcctgggctgcgatgaggtggctgccaggagggagggagggtggctgagggcatgtggcctcctgggcatgcagaggaaggccagggcctgggagagactggaccaggcaggagcgaggcttatccagggccggcttagcacgtgagctacctcctacctcatcatgaagatcccagctgaaggcagggcactcctgttggcttcattgcaaggaaaaagtggtgttctactggccagggtggtgctggctgttggttgctggcagacttggaggaaagccggtggctgaggctggcagaggcacagacagaagggctgggtgcaggcatcacctgggaggtgtggggagggctgcagctgggcaagttggagcaggagaccaaaccaggagatgccagggccacacaccagcccggttctccctggagcctcgagaagcagagctaccaccctggatctgcagtcagcactcccacccctgccctgcccctgccccaagcccagcaccacccatggagagggtgacctcaggccttggagattgctggctcgtggctgcaggtggcttggatccatgcacttggatcctggtatgctcccctcacatgtcaaaattcctgtctccatccaatcatggcataacactgtactccctgggggtccagcctgcctatctcacacccagagttgcactgccagtctgggctgggatagcgatgtggttaactgcaaccaactgctgtggttataaaccaggtaaggggcccagtgacagccccgctgcatcattggcaaaggactgcttgggggctgagctgcccgggggctggatgagatgacccctggaggcctttctgggtgccagactctgtcataagagggagaagacagaggggttagaaacacgtggtctgggcttggggtggctcctggcaaggcagcctcacaatcccaggatccgtaagaggacaaactcagaggaatcaaaacgcagctctccccaccaccctggacgggtctcagcgagtgtcagagcccatcgccaggttctgaggagcagtgtgatgggccaatgggaggctcctctccctgtagcttgcccagagtcctgccaaccagacagggtcccaggtcagcccagctcctttctcaagactttgagacttggtgtcggttggatcacattgtttgaagaggtgagatttgtccttgatctgcagacatctcccaccaccgccatcatccctgctgtttgggtcctaattggaagagcctggaaaggccacctgcaccattcccctgaccccaaaataccacccccaccctccaaccccccgcccaacctgcaattccactgagaaaatagctcttttgagtgtgtcagtgctcaaaaagcgcttttaagagataaacacttttttattcatcttgaaaatggttgtgcttagagctcagcaggtacccagttaatatgtataggcttcagtgctaagtactatgcatggcaaatcttttgctctcaaggggtttacaatgtaagggaaggaaggcattcttatgcagtgctggcaaacactgcccatggcagacagtacaagttgactagtgtgcctcctgcagcagacattagaagtcgattactgcacttttcctgacctaagagatagcctgatgccttctccaacccagccctcccttaaaggtgcctgtgggtctcagggtctagaagctgctcaccacgtggactttgtggggcattgaagcctgaggggatgctcggagaagaagaggattcttgaagacttgagtgcctgagagcatttatgtgttcagttcgtctctgagtcagtcaacaaacattgatggtgtctgtgtcgagggtggccataaagggacacggacacgtaaacatgtagttaaaacacaatgagataggagccttgaccttggcaggcacacaggcaagacagacccctgcctggcctggcagggggtggtcccagggaggcttctctgagggggtgtcatagtgggtattggggaactagcattccaggcagaggaaccgcgtgatcagagtcacagacagcatgactgcggtggaatgggggtggggcagggaacctgggggtgcagatcctgaggcagggccttggggccatgacagcgacttggaccttgtcctgtgcgcactcactgccttcatggtccttcgtcccctctcagagtctcctgcaaggattttccaccctcagtggcccttggtccttgcccccacccccaactccctgccttctcagtcttggattaagggggccttggcatgggtctgggtgcctgtggctcccgtgtgccaggctactggggtctgtttctgatgtctgctgccaccctgggcccctgagaggccttcaccccagccctcagcctgcccggggcagtgtgattttccctcctcagggcagaggccagccttgtttttcctccacactcaggaatcgcgcttcaggaatacacaaagcagctgttaaaatatctgggtctggcgggccggccacacagtgggccccttgttccccttgcagacagcggcctcagagcacgtcccaaccctctgctgggtcagcggtgctgggggagtggtgtcagggagagaccctggacctctaggcttcagggctctccagggaggaaggtgatggacaataggaatttagaaccgagtggaacaagcacattacaaacagatgccaacccgagagtttagatgtcagactgtagaggcgctggcaccagggtgggtggaggaggatgcctggatgggactgtcgtgtcaattcttggacagagccttctgttggtggggcagcctccaggcactgctcaggggcaggccttctccagctgcagggatgataaggccaggcctgtgtgtgccaggccccatgtgagacattctgtttatccccacttaacagatgaggaaactgaggcttagggagaagttgattcttgtcgacagttcctgacagagctgggaggtgaacatggccattccttctccagagtctgcactcactggcctccagctgaatgtgacaaccactgacgtgtgcacaggtggtgtcaaagttcagtcacagcacaaagaggttggtgagctctgtctaggactctgggaaggagggtgtgagagcaagctttctggattttaaagcatggcatcctcggtagagcagagggaagaatgttcctggcaggaaggcatggggattggagagggcctgctggctttcagggagtaaatcccagtggaaacaaacgaagtcttgaggccgtctcaaatgtcaacctcaaagtaggtcttacccacagcttcccagagggaaaaagtcctcctgatactcatcaactcttatcggaggctggctgcccctggaggggcctgcatttcccattggggccctccctggcccctgttccagcccagcaagtcagtgaattagggttaattatctgttttcctggacaccagcaggcccaggagctgggcaaattaggggagcttttgtacttggaaaaacaaattcaaggagcgataaagaagcaggtgcacctgctaggatggggattttgtatggtgcccacccctggccacactgggagggtgagggctttggccaccccctcaacttgcaggcccctgggctgcatcccctgaaagaggtggggacagcaggcacaggctggccaggctgtgctgcagaagcgtgtcagacacccaggggctggaggccttcctaaacttcagtctcctcctagcctgccctccccagataccctgacagcccctatggttccccttcaatctggcttatcacttatttctttctttctttttttttttttttttgagacggagtctcactctgtcgccaggctggagtgtagcgacacgatctctgctcactgcaacctccacctcccaggttcatgtgattctcctgcctcagcctcctcagtagctgggattacaggcgcctgccaccacacctggctgatttttagtagagacggggtttcatcatgttggccaggctggtctcaagcttctgacctcaggtgatccgccctcctcagcctcccagagtgctgggattacaggtgtgagccaccgcgcccagtctcacctacttctgtctccctgtgggaacgctttttttttcttgccttagagtgtgccaagggcttctccctccctttgctcatgcagttcccagaccctggagtgctcttccctttgtgctctccgggccaagttcaggaccctttcattctctgactggaagccacagggcagactggatggtcaccaggaagcctcctctgacctcctcaggtagcccgcccttgtggagctcccacaagtagaaactcactgctgcttatttgacatttagcatatactgccttggactttgaagcactctctacacaagtgcctgcctcacaactctttacatgtgtgtctatagctgtgcttttataccttttgacacccctataataattctggagcctggcaggcatctgtgcatacaaaggagttggccatgatggagaaagtagaaaactagaatccagcagacatgcactggcccaccagcactgccgtatcttagctgtgtgacttcggggagcttacttatcctctctgggcctctgattttaagtgaaagcaaggttcgagatattggcccagtaggagtagctgctgtgaatggtgaaattacttgaggagaggagctagccagctcgggacacctatgtgtgcttgaaggttttgttgtctttctctagtcatggggctcccggtgcagcgacaccctaggcagaggagggggtctaaggaaggacagagcagttcaagaggacccttcttcctctgagtcaacatgggaaccatggatcccaggggatttcggaagagcgatttcttttcttccagatgtgtctcccttcgttgtcctcacagcctactgggtaccaggtggggtggtgggccatgcaccaaatccatagagaaacaggggggtctgttgggagcagtggctgtgcactggtgcctcacatacatcgccaccttcaagtttctggataatcttgctgggggtgcatccccctcactgtctgtgggaagccaaggtcaaggttatggagcctgaggggcatggggctgacccagacaccatggccctgcctccccgcatctgaccagtccaggcatcatttatagggtctgggctcccctcctgagtttgccatctccccaaaggacccagagtggaggctgggggctgtgggaatccctggctggagtggtggaagagggaccagcgcaggtaggagcttgcggttcccctcccagtgtggaatggctggaagagggggagtcagggacaaggcctttgcacagctgcccacccgtccacactctggaagacccttcacaccttcctgagctctgcctggccccagtcctggagctccttgttggtgctgctctctggggctctgcagagctgttatcctgctgggccctagtgaagccatggcaggcttcggtttcatgtacagtgatgggaaggtggacagagaaggcagaaactggtgctgcctaggcctcagaccccacaggcaggtctgaggagctggtggagtccctgactgtccccccagggccctgcaggcaggtgatcttttcttggagaagaagaaaatgggagaagctgcccatgtggggcagctgctataataggtgttacgggccatgctgggaaggctgactgtcttcccagtaccctgggagggagggtactctgcatcactggggagcaaactgaggctccgagaggggaagtaacatggccacagacacacagtggatgcagactatgctggtccaggcacacatgcatctctcattgtgggagaattcaatgcctcatgttttaaaataggattattttgccgctggcagtaaaatgccagaagtcctggggaacccttacgttccccacgtccctatctccttcagggtggaggagtgagtgtaaatttgtctggatgggacagtggggactgacctgaggagtcagagcccgctttgctcctaggctgccagccttggcattgtggcactggactggtgtccctgaggtcattttcccagtggagacagtggtgtgaggggagaggaaaggactggtgcccagctcctggtggatacaagacagagtcctcagggcctcaggccgtgagtcggctgcttcccttttagctgtcatgaggttagaatgacgatttcccttaatcagggtggcggtgtgctcttcactctgggaaatttcactttttatctcattggatcttaaaaataagtctgtgatcaaggcagggcacatgtttatctctcatgtatgtgcatgtgtttgcctgggtctgtgtccttgtaatatatacatgtgcatgtgtgagtgttcatgtacctctgcatgtaactacatgtatcctgtatgtgtgcacgtgtgtggctgcatatgtgctgtgagtgtatgtgtgatgcaggtgaccatgtgtgactttatatatgtgtgtgcccatgcacacgtctgtgactttaatgcggtgtgcacgtgtgtgtgtggcctgcgtgcaggtgtatgcatgtgtgtggctgtgtatatggtttgtcggcgtatgttctgtgtgctgtgtgagtgtgtgagcctgcgtgtgtgtgtgcatccatgtgtgcctatgcgtgtgggtcctgggcacgcatgccgcacgactgagatcacagcagaggtgagaacaccgtggctctgtggtggctgtgactgctgagaggcgaggcttcatctctctcctggagattgattttgcctggggaacaatgctctaattcctgtgagtcactcgttagaggagttcaaagaaaccaggtggcgggagggtgtctgggatttcaggtttcagggtgattcgctcattctgctctgattactaatttattcttcaagcaagtcctttaactcagagttcttaaccttttctgcgccgtgggccccttggcaagcaagtgaagttcgtggactcctacaataatgctataaatgcatagaagaaaagacacaggactgtgaaagaaagtgatgatgcgatgtctaaaacgttcaaggcaccgcatctgtgatcaagaatacatgtgctgctttaccgacacatcaaagagcaaggtcagccgtgggggctaatgaatggctagcataagtgggacaccacggtgggcttgggcatagctgcgactcatgccagtggcagcctgagggagacaccaacttcagctccaaactagcaaagataaaaatgtatcttttcatcaggttagatagtcctgctttaactggaacttgtagattatttatttatttatttatttgagacagagtctcactctgtctccaagctggagtgcagtggcgcggtcttgcctcactgcaacctccacctcccaggtccaagcgattcccctgcctcagcttcccgagtagctgggactacaggtgcacgccaccatgcccagctaattttttgtattttaatagagacggcctttcatcatgttggtcaagacggtcttcatctcctgacctcatgatccgcctgcctcggcctcccaaagtgctgggattacaggcatgagccaccacacctggctgaacttgtagattatttggaagccagaagggaccttatgagcaccccgttcggtttttcatatacctgcttctgtatcagaaagacttgtgcaactaacagaaatgcagctcttcttgccaccccctgcctagacttggggaatcacaatctccaggggaaggcccagaaatgctcctgaagcatcttgctgtcaccagtgcccctgctgaggccccagagggcaggtgacctgggtgaacctcctaacggacagggggcttctccgggccctgggtcccgggtgcccgctcccacccccttagcagaattttggagagtgtggctgtgtttccttcgtggttgtttggacagcggcagagctgtgtgttttgaaggtaaagtgaggaattgactcttctccttccctgtggtaggtgctgtgactcccagtccctctttttctggagctctgtggagcccgtgggagccatccctggagagaccctccctgctgtccccaggcagcccctggaggcccagatgagactatccgctttggctgcagggcttgacgggcctgcctcagatgagctttggggagtgaaagtggctgcctgggaccctgggcgcctggtgtttacctagaaattgtgctaatcccgctaattcctgtgatttacacagcctcttggctctgtgtactatcttcttctccgggaagtggtgggaaggcgaggccacggatgcagtgggcactgcctggaatccccccgctgcatctgctccccacaggcgttcacgaaacctcaggtgcatctgtgtgcacatcctctccctgagccacagtctgggagctgggcatctgaataaatgcccctcctccctcactacattcaccctgtttctggagcgaccacgccctgaggtgtcaggaggcattttggctggaggatctgactgtaggcctggccccgtgccttcctggggagtggccttgggcagctcactccccatgggggcctcagcttcctcccctataagaactggtgatgacatctgctgtgctgaagtgaataggtggggttgccatgaggaagccgcagctgctgtgttttgggtccgttcttcacggatggagccttctagttaccagcttgagctgggcctggctgtgggaatgctgtgctgaagagctcctggcctgaaggtgatgaatgtaatacgggggtgttgagtaggacatgatctgactgcttcagggctgcaatcatgggctaggaggggaagtggggcttcctggaggaggtgacgtctgagtggcatcttgagagtaagagttcatcagacacagaaaggtgaagggtttccagtgagtggcatagcttgggcagaggcctggctgtgtgcaagggcagagccagttatccctgttaggagggtcaggcagccagggagctggtagggagaggaggctttaggtagacatgggaagactttacctgaaggccaaggggctcagcaggggagggatggagtgatatgtggtttctgggaagatgcctggctgaagcacagggaattacctggagtggaccagaggtgtgaaaagtgccaagacccagaggggaaagagtgcctggcacagagcagccagcgggagaggcagtgctggtgaggcgtgcgagtgctggggggtgtggggtgaagtgatggggctcacagtcttcgtgtgtgtggcgaggagaggaggaaggtgtcttaaggatgcagctcaggtggctggtgtggtggtgcctgtgaccaggtaaggggcagaggaacagcaggcacgaaccagtgtatagtgctagtaggccattcagatagccagactcttaaggggcggattttaaagtgggcttaaaagagcaggcagcaatccctgaatttctaggccaaaaggaggcccctgactcaccagcaagcagatttttctctcccccatctgcctgactttcttgggctttctgggcagggagttttgaaagactgtggaaactggccaggctggtgtgtgcagatgagccaggagctgacaggagctgtggacatccttcatgtggcccctccattgttcttgtgtactcatttttttctacttaaaaagatgtgggagtattgtgtggatttaaaaaataaaattctaggccgagtgtggtagtgtgcacctgtagtcccagctgaggtgagaggatcccttgagcccaggagtttgaggctgcagtgagctttgattgtgccactgcactccagcctgggtgacaggagagaccctgtctcttaaaaaagaaaaattcttggctgggctcgttggctcacgcctgcagtcctagcactttgggaggccaaggcaggtggatcacttgaggtcaggagttcaagaccagcctggccaacatagtgaaaccctgtctctactaaaaaatacaaaaattagccgagtgtgatggcgcatgcctgtaatcccagctactcaggaggctgaggcaggagaatcttttgaatctgggtggtggaggttgcagtgagctgaggtcacaccactgcactccagcctgggtgacagagtgagactctatctaaaataaaaaaatgaaaaaaaaaaaaacaacataaaacagaaaagttatagggcctactaatgtggatttagctgagggccccgggagtggagctgaccactggtgtctgcacactgcgacccccgtccccacactctctgcaggaccttcacacagctgcccataacctttctgccccactcctccaggtgtccagccaaaaatgccagctatcttccccaccaccttctttaaaacatgtgaccggccaggtgcggtggctcacgcctgtaatcccagcactttaggaggccaaggcgggcagatcacctgaggtcaggagtttgagaccagcctgaccaacatggagaaaccctgtctctactaaaaatacaaaattagccgggcgtggtggctcatgcctgtaatcccagctactcaggattgcaggagaatcacttgaacctgggaggcagaggttgcggtgagccaagatcgcgccattgcactccagcctgggcaacaagagtgagactccagctcaaaaacaaacaaacaaacaaacaaacaaaaacaaaaaacaaacatgtgaccatcagatttatcttctgatagaaaggctggattgccagtgtctgctctgacccaccactcagctggagacggaagttgcccatgccccgaatcccgctgggtgttcctcccttgctcacagccactttccatccctccttatctagtctgtagcctggtctgttggctctgccttcaaaccatgtccatgtttcaccagctccaccgccacctgcttaacccaaaccaccattgtctctccctgggtcactgcagtagcctcctctccccgaaaagcctgctctccgcacacagcaatggagtgacccttttacacccggagtcagtcctgcccctcccctgctcaagaccctctgatgcctgcacttcccttctggccactactcaaagaagccagcctcctcccacaaggcccctggctcctggctttgccctctgactgcagtggggtggcccctcaggcatcccatccctaccccagagaggcctggcagcgctgccccgctgtgcccctgcaaccctctctgtcctgctttcttttcctgagccacctcccactcactgagattaaatctacatttattttccccttgtttgcccccaaggagaatgtaaactccacatattgtatcttccgcaccaggcatgatgcctgatgcatactaggggcttaaaaatatgttgactgagtgcgtgtgagtcaataaaggatgaacatttattgaatgaatgggtgaaggagtgagcgaacatgcagatgaataagtgaaaggttctggtgagcagggaagccacctgaaaatgagggcctttctttgaggacctctaggtcattgtcactatatttgtttttattttccccatgattcacagacagaggtcattgtttctgactttatttccctcatcagaggctacccgccactcatatcagtaggaacctgttacttagattttgtaaaatctgggtaaaagatgatgagaatggcctgcagttgtccgtgaggtcgttcagaagaccagacgaatcccaggactaataattctcaaaattaattaaaccctccttcccaattataagagaattagaatgaagttggttgctttaggagcgagcggcggtgtgaatctgggtcggcgtttcccggctgggtttgggctcagtgttggtgagtgtctttgtcttctcttttaggattgccacccaggacgatgagcggctgagatggagacgtctgcctcagccactgcctccgagaagcaagaagccaaaagtgggatcctggaggccgctggcttccccgacccgggtaaaaaggcctctcctttggtggtggctgcagcggcagcagcagcggtagctgcccaaggaggtactttctgtttcgcacacttggagggcagcaggggtgtttttcattagcccgttaggatttaattagagtggtggcccatgtcgtcagggaggcatgctgggtttatggagggcgaagaggaaggcacctctgctcccaggaatcccaggcaccatgaaggtcacctgtgagtttgctaagaggtctggccaccccaagtccagggggctgagctgcctcagacagcggtgggtggggcctgagtactgggaggggagagagggaggaggggagagagggaggaggggcatggtcgctgccaggcagccctggggtgcgtgcagctggcacatttgaaatgtgcccagagaacttcttgcctcttgcccgccaaggactgttttggaaagtaattgtctcctgatgccttctggctctaattagagggtcaggttcgggatttactatcttaggtgaatttttggccaacttaattataacaaaagagactacacgagccacagcctctcattttactgccccaaagagaaagactctctggtttctactgggccatccgtgccagcatcccgttgggaaagtttggcgggaaggcgagacctccgctgtgtctgcacagtccatctggaggccacagaactatttctgtctcggaggaatggagagacttcgatttcttttcctccctttttgttccagtgcatttagtcaggccctgttgctctcagggctgaggcacagctcagagagcaggcagggaagagaatgcgccttttcttccggcgggcgcttgggcagcgcccctcacactttgatgtatacacagttgttgggggcttgttttggtggagaccccgattcaattaagttggggcagggctggctgagtttctgcatttctgttgggtgccaagatgatgctggggctgctggttcacaggccacgctggggccggagcccaggaacatggaaagaccctcggaggggcttaggagttggtgcttctacgagtggacctgagggcctgcggggggttgttactgtatttacttttatttttcctgcggttctaagtgggaggtcattattgggatgtgtggctcatgtcaggaaagggagatctgaggtcaaccttcaggccccttggggaggtggccttctgagctggacgatgcctctccaccctgtgccccttggacggggactctctaggccctccctctgtgaggaggggccagctgggggtggaggaagagctcttaggtggagtgggaggagccaagcgcacagggagggaagagctggtggagcggccctggtcctggggccacacatggtcttttccttcccctgggtcagggccatccttggcctgtgggggcacctaaagctgcccctctgcccatgctctgaggccttgtgagctccaggaagcctggcctctgtgtatgtctggcctgccccagggttttcagcgggaaccatccccccatccctccgccccacaccctgcctctccaagccatgagtggatcatgaaccaccatggtgcaatttcctgatgtgtcacattagtagaggacagacttaggcagtaattagacagtaattagaatgtaattgccggggagcccctctagtgtcaggctgagttctcattattggtgcaatagcaacagatgcttgagggattctcaatctgtggcgggagtaggggccaggcaggaggcccaaagtttggagtacagcacctccacaaaggccctcacctcccaaccccaccccactgcagcacaccctttcctgcccaccccgcaggcccttgttgtctgatcgcagggtggcttggctggtgaggttccagcggagggtggacccagccttcgtgagcatagttgccacagggcaggtggcctgttagcttcagagcagtcttgggccatgtgtctgctgctggagagttgtgaggaccccagagcctcctcacccatcgctgctccctgcacctgtctctgagcagctttttttgggaagggtcctcctggagtcaggggagagcagctgtccctgcgtggcgcaaagcagggacatcgtgggccaagtctcctagtgctggtaaaatgcgacggctgcattcgtggatgggatgggaggtgcgctggcctgggtcccagttttcctaatctgtgtcgagagtggatttgacaggtgttgtccacagtctttatgatcttggaacttcgggtcttccttaaatgttactggatggtggcagaggtgcatgagcaagaatcctcatgtattcagcaaccctgagtcccccagaaggctccaaagagccatggatgtgggcctcactgcctgcgggagtacagacctgtcagcaggtgaggagaatgtgcggaaggaggtgcctggaagctgcaggtggttggcgtgggtccccctcaggggcggggatgctcttgtgttcatctctaggtctcagcatctggtgctgggcctggcatgaggggtacccaagggtcttctgggactggaatggtgtaggagaaagggtggcattggtgaaggaggaagtcttcatgggccagaagcgtttgctgcagccactgaggagttgggcactcagccatcaggcacagggctgggtgtggacagtgggtgaggaggggccgtgagggactgtaccaagcctgggagagggacagtgccgcagggtgcaccccgggtggatgcaagggtgtggggagctgagaatttttgttgaggggcccctcttctcgagttgtttctggcaaagacgaatcatcttggtctgggcgactgctctgaggcctgtttgctgggggcaggagcagactgagtcgactcccctgttgctgcgcaggtgaccacttagaagcctggctcctctgaggcctggcttgttcctccaaatcccgtgacattgtcccccatggttcacaccctgatttgctgtctggcggaaagggatgatttattattattattattattttattttttatttttatttatttatttttttgagacagtcttcactttgtcacacaggctggagtgcagtggcacgatctcagctcactgccagctccgcctcccaggttcacgccattctcctgcctcagcctcccagtagctgggactacaggcacccgccaccacacctggctaatttttttgtattttttagtagagatggggtttcactgtgttagccaggatggtctcaatctcctgacctcatgatccgcccgcctcagcctcccaaagtgccgggattacaggtgtgagccaccgcacccggccgaaagggatgacttatacgagcttagtgtttcctgacttattacacatcagagaaggtgtggggtgggtgggtcttatctgaggatgtcaggggcgcagtggtgaggaaacagccaaatcctgcaagctgtcaggggctgtttcctggcatctgtaaggtatccagatgtgggggcaccctgcattccccggcagctcatggcccctcatgcagcctcccccacccctcactgtcaccagttccgagagcttccattccacggctagaattgcatggcttgagttggttgaaacagtacacatacctgcaggcagaaggatttcacttttttgtttgtttgcttgttttttgagacagagtctcactctgtcgcccaggctagagtgcagtggcatgatctcagctcactgcaacctctgcctcctgggttcaagccattctcctgcttcagccttctgagtagctgggattacaggtgcccaccaccatgcccggctaatttttgtatttttagtagagatggggtttcaccatgttagccaggctggtctcgaattcctgacctcaagtgatccgcctgccctggcctcccaaagtgctgggattacaggcgtgagccaccttgggatttcacttctgagttctttatatctgtgaaaaattgaaaacagcctacctgttcattgataggggattggttcatctgtggaacatcttgaatggaacacgatgtagccactgaaaatgttaattaagacttttcaattacagggtgggaacatgcttgtattctaatattaagtgggataaaaagaaggtgcaattgatctcaagcacccctagcaatgagatagaaagtgaaggttcagagtgaggagagaggacatgaagggggtgggaggccccagccggaaagctcggaaaacccaggcaggagctcctggatgccaggctggtgtggtcagagcctctccttcagtacctcccgtattgtagatgagactgaggcccatttgggcatggggcttgcccaaggctaccagctgcttcaaccacgagctgggcccggggcttggggctcctgcctctcacatggtgagagtctctttcaggtatttgcttttagattgttatttagattgctgttagacttgggccttaatttaggtcctactgctaccccagggtgagtgtccagccttggtaaggtctcctcatgtgtcttcatgcctcagttccctcatccatcccaggccctgatggcacctgctctcttccaaacagccagttatttgaggtctggggccgtgagttatttgcaaagtcacctacctcgactggcctctgttgcctgacttcccctaggagtccatgaggtcggacctgttgggggctgggtgtttccacttagagtcactatttccctgtgccagaatatgcgtgagaaatatatttgcagagcagagcatggctgggctggaccgagctggaccaaaggaaaaagcagccctgtggtcagactggggaaaggttagtttaatcatctggctggagcagttcataagagcagacggcagaagcctgggagggcgagttctttcccagtctcttttgctgttgtgctaacactttggaggccataaatcttttaaaacacattttggcccagaggttttcccctcctttaacttctaaaatggtgtaattttaaaagcaatttgattcagatgtttctcattgctttatactgaaactgtccaaatgctgttgtattttcctcctccactgtgggttctctttcaaaaatatttctgaacctctctgtgtgcctcactgagcaccagggactactattcagagcctctgggataatatgaaaggtggagccatgaaacccagagctgggtctgatctcatgagttttgctagtttctggaatcaagcagccagacaggctttagacatcctgggatgtacctgcaatggccaacgcccacctcttccacgaagcatccactgtgtgctgggccaggtgtcctcccagtgtgggccgcaccagcaacatcagcatcccctgggaattgttagaaatgctaattcttgagccccaccttagacctactgaatctgagtctgtgggggtagagcccagcaagctgtgtttacacaaaccctcttggtgattctgatacactcctaagttggagaaccgcatgttctgactacatgaggtagggtgggtcttcccatacataaaatgggagttagacacagagctgcagtgcagagattacaggagacttctgatgtgcttacacaggcctgccagggcacttcctggatagtagctgtaacactgcctctcttagtgcaggcagtgctaaggaagtagtgagaagcagcccaggctctggaaccaggctgcctggttaagtcccagttctgttgaccttaggcaggtccgtgcctcacttttctcatctataaaatgggcatgatcttggttgtgagcattccttgagttagcacatgggaagtgcttcgaaaagtgttgggcacagagggccttgtgtgaggtccaagttgagtatttgctttatgaactattgctattcttcctaccagttttccttttctagatctgcatactctgcctgacttagaaagtttccctttcactggtaacccttgcctgctgacccgttgaggctgacagcaggtgggaaacccaggtttctggtgacttcctacttgagagtggtgggtgccctgggctggaaatcagacctgggtgcctgtcccactttgctttgctcccagggcctgtcctgggtgtctgtcccgagtgggctcctggcctctctgacttggtcttttccccagcacgctggagaccagaccagaccaaaggttactaaagctggccaagccttagactctcgtgacaatcactatgtaagtgcagggtccagggcagcccctgggctggggcctgggcatatgtatttttaatacgcttcacaggtcattgggcgcagtccgtccaaggcatgaacaagatcccttggagtattcaagagtctcagggggggagactacggtttgcagctggtagtactggcggggctgtgaccaggctagcatagctagggtcaagcactagacgactttcagcagagcgctccagtgttccaggaggcgtgtgtgctacctactcatactgacagccctcctatcttcttcattggccctgctgggttcttggaaagtttttctgaggcacagttttgcttagtggcgaggcatgcatgtctatatgggaatgctgtgcaaatagcagaatatttagacgactcattttcattgtgttggccagagctagaaaatcccctcccaccacctgccttaccacacctaggaatctgtccaatacccctccattggtacgtacctccaagtccctggtgtctttgcactctgtctttttctgtgcctccaggatgtccttgtgggcagggcattgcttgttcaccactgtccccacatccccgcttgcagcagacatcccataggggattatggaatctgatgctatcatgccagaggtgttcccggtgggctggtgtggtcagctgtctctgggtataagggtcagttgaggctggccgtggtctttggcccccctgccaggccccatggccagcagggagctgagtgggccaccttccctggcttatccgagtttctctgctggggccacacacttttgccttggacctgatgcacccaggtgtgactaagtgggcaattactcttatttaagtgattttcaggacggctgttgatgctgctgggcttgttttatggcccagccatccagaacaaccagttcccctcagactttgtccagagagcagagctgagttcccctgacagcctggttcacccaggaagcggggtgcaggctgaccacccagatgtttttcagatggttcaggagtgtactgcaaggttggacgcctggggcgggagcatgaggttggagacttcttcctgctcccagcagagtctagtgggaagagcatggcttggggtcaggcagatctgggctcttcttaccctctgcttaccagccgtgtcttctgggcaaatcaaggaacttctctgagattcgtgcagtggcgatggtagtggtcactacttctggctaccatggaactaagcgagacaaggtctgcagggtggctagcagagcatgtgggcacggaggaagtaaatgtccacataacggaaacccgagcattcctctggcctgtcctggcctcacactcactgccactcagaacggctgccgtccagaatcagcctggccgccccatttccccaagcacaacaggtttgttctctgcttctggccgcagcccggggtctggactctgggaggctctcctggcccctgcctgtcgctccccttggttgcagagaccggcacacatgtttcacgtcacctctgtgtcaccttgttttctggctggttcctataagctggtgaaccctacctgcctggaatgacagtgtcagaggacagtgccggtggctcctgcccctgtgtgctccctggggccttggccatgcctggccggcactccttcatttctcacggttcactgtgaatgttcagctgatgcagagttgggtgaagcttcaaagtcatttccacttacagaactggaagaagcttttgaaatcctctagtttgaatccattcattttacagatgtggaaactgaggtccagagacacaaaatgcagagggttgcctagtgatattacttggactggaaaccaattccgcaggaacattccatcacatgggacacagctgtccctcaacctggccctcctcctggcccaaaccccaacttcccaagtgactgtgtttatgttggaaacatttttctgacgtttggttctgtcaaaactaattttagcatttctaaagcttggtaaaaatacagcctcattactttgatgtcagtgcatagtttactattagtatattctggggtttatcattttagtcatgtttaacacggctgtgccaggcatgcactattaaatctggcttattttacattcctgtccggaattatttatttgtaacaatttcctctctatcaaaagacacagctaatgctgtgttttaatgtgttatttacacacaaaataacctatttacaactcagtatgcgccggagggagaatggatgggcccctgtttcctgcattctgttatatcagagtttaacaatctggattgctaatagaaccatttatcattacttgggagggggggaaagagataatttattttatgtttgtggccaggtctcaccgcctctgatcttgggaccattttgaggataatgaagtgaagccctgcatttggtgggggctgtggggcacccgggcctgggtgcctctgggttccctgcattcatgtgcacatcctacagatggtcccgaactgtggaccagagaggtggtgatgacagggacgttgcctctgccttctaggagcttccagttagaggtgacactcagcagatggtgacgaatcctgcccatagggcttcacgggggaggcagtgtctgagcctggggacattcggggttccaccaggtggaaagaggaaagggtgggtgggccctggtgggaggaggaggggcagagtggccccctgggagtgtggggagggaggactgggcgccatcagctcagtctgtatgtctcctgcgtgagtccatatgtctcctgcctggcatatggggtctgaaggacaaggctcctgttgccctgcggggaggcgcagagatggctggcacccaggtgggtgcatagctgatccagggtgcaggccgaggtcccggaggctccactgaagtctctttgaatggacattgaggggtaaggagggaaagcgccatttgaagctgctgtcctctatgaagctctgtgtggacaccagagggggataggaagtgggggaagatgcatttaagaagcaggggccatggccctgtccccaaaagcttgtggttcccccatggagaaaccagacaccccagttacgatgctgatgtgggcattgtctgctgcctgcagtgatccaggaaaacattagggaaggagtgtggtctcagtaggacctggtaacactgctgtgtacagccctgtgacctggctgctcagtcagtcccacagaaagccactgtgcactcagatcagggggctggggagggggtcaccaaagtgtgattgcaaagtgtggcagggcttgggcaagcccctggggacgatgcagggagccatcagccccaggacaccagcatggtctgggggatggggcctgggcttggacaggtgaggtttgaacccttgccctgccccttctcggttgggtatcctgtgctgatccgaaccccagtgtcctcattttaaacgcaggccaaaatgcgtatctttggagggctaggctgaccaataatgagactccagtgcttagagggtccctggcacacagttggcattctgtacatggtagttcagctgttagtattatggttcttgctcttattatgattcttaattcaagaactgttttctgagggtagcgcatacgttccttaaaaatatttgagagagcaaatgaaggagctgagtctctataatgagttagcagttcacccgtgatgtgcaaggaggaaccacactctagcctgagaaacagcatgggcaaaggtcctggggtctgagaatggctggagaggctgagctgagcgggaagcactggcaaatgaggctggttttgtcagccccttggcaaagggctcccttccctccccgatcctggcacaagctcacatctgaggccgagtctagtggcccctcctagggtctgtgtcctccctctgctcacagccacacgtggacgctggtaactcagccaggccctgtgtgcacggcttgcttggaccacccccccacacacctccccgcccccgccaccctgagcatctggcttcttctccttctgggtgggcagggtggggagggagccagaggggctctgtcttgagaagccgcccttggctctttccccttgaatatgtcctggctggccctgctgtcagagggcgtggacctctgctttgtgttttgggggattgtgaagcttgaaaccctggcaccagacagccaggcctctgggcagagcagggcctcatccgccgtctgactttccatctcgttttcagcagtgatatttgagaggaagtttgggtttggtatggagccgggcagtggacaccgctttgcaccttctattatccctgcaattctagaaatggaaggacgtccaggagaagccccttgcagggccaagcatgtggtctctgtgtggtgtgatggtggccagggtggggaagtccctgcccccgccgagtgctgcaatcccaccattaggtgtttacccccttgctgtcaccttacctctgggtttgtgcaaaggcccctgttgtccatcatcctcctgtgacctctccccagtggctcctggatcagctggagagggccaggcttctgagcactggagtacctgtgcctggggaagctcacccaggagagaagagggtcagggagggaagaaaaacttgccaacgacacactttgctgactgggtgagttgctgaggctcgatgtcagcgagatctttgtcctgttgccagtccccagactgtgaggtttccacgctggagtcaatggccctctacgccatgttggtgacaagaaaagcaacaggcaccttcacttagaggacagacaagtgtgagttcacatctaggtgtaggagcaggggccacccttgccttgtctgtctgtgaaatgggggtgacaaggctcccctcagccaactctgtagtgcagggtggcctggcatgtgggcagcgggctgctgttgttattctcatgggatagtggcaacccttgcctgaaagcacctgaggccgtttgtgtcttcagtggctcgggcactgtggagcttcccagctgcccatagttctcagcagcgcccacatgcctggccccctgggttttctagctccaggtcatcagggagggaggacccaccagttccactcttcaagaactacctccgataattgaaaacctatgtgcacacaaaactttgtatatgggtgtttatagcaatgttagttacgatagtcccaaaatggaaatgacccaagcatccatccgctaatgaatggatgagcagaacgtggtatgtatgtacaatggaatattactgagtcataaaaaggagtgaagtgctaatcaatggtatacacaaatgaacctcgcaaacatatgctaagagaaagaagccgggcataaaagcacaaatattgtaggattccattcccatgaattgtctagaatgacaaatccatagagacagaagggagatgaggaggtgccaggggctgggagaagagggaatggggaatgattgctatgggcttggggtttctttttggagggatgaaaatgttctgtaattagatagtggtgatggttgcaacagctctgtgaatgtactaaaaaccactgaattgtggactttacaagggtgcattttatggtatgtgaattacatctctgtttaaaaaagaagggagggaggagaaagaaaggatagaaggaaggaaaagaggaaggaagtgcgggggagggagggcgcctgtggcggcatgggggcctggtcgtgctgctgctcacagcccctgggatctccaagtgccttgtgcaccgctacccctcagggaggaccctgcttcccctggccaatgagcagccttcccatctaatctataggccccagaagctctaaaaataactgaagtggaagggggatgtttaatgacaaagtaaataattacattaagggtgcgagtttggaggggagctgagtaaatcaccgagaaagagcaccagcctccagctaacttccactcctttatcaccagattacatcctccttggaacctgaatcattgactgtggctggtggcaggctctgcagtggtgggggctgcggtcaggcaggtgctgagagagatgccctgtgagcatttcagggtgaccctgctggccccaactccaggtggatgagccccaggggcgggggccctgtgctgctggaaattaactactctgctggggggagccaggtctcagggatggcctcacagccttgctgcccacagctggagggggccaggcttctgagccagagtggcttcaggggccatttggtccattgaggtccaaggagggggatggtcttgccagtgctacgcggtgagtatctaccagatcttggtagggagatttctgggagtggtgttcccagtccaggtgtgctgggccgtcttctgtgttgagagcaacatctgcagtgggcaagccccagacagactatagccctcggaagtggcagcgttcaccagctttggcatggtgtgggctggggctgtctggcacacctgcccacctcccctgtcctggcctggagccctcatttagtcccttccattgctgtccctcctccctctacctcatggcctcatcctgtcctcagggaggcccagccaacagcctctctcctctccctggccctgtgctacccctcaggatatagaggatgggcaggctcccaggcttatgggatgtgctaataggggcgcttggaagggatgaggatacagggagacagcagtgccttggcctgaagggacagatcttctcgatagaaactgagttaggacacttgctgcaagcaacagaagcccgctctggctctctgaagctacgtggcgttctggtcctccgtaactcagaagttcagggttagatttgcttttaggactagctaagcttgaggctccagtgacgtcactgggacatgtctctttctgtccgtgatctcgattggctttccgctggcctggcattctgatagctctgatcaccagagggtggagttgctgatgtgtgcctgatacccatgagctcagatggaggagtgtctcattccgggtgattccaggaaaagccctgggggcaacttattggctaggcctgggtcccatgcacccttgtgaaccatccactgtgaccgagccatgtagtattttgtggggtcccatgcatacctgtgcaaagtggggtgggtcagcccccttatctgctggagctgtgcgtagaagggtggcccatgtgctgctggtcaagccaaataccagtgtccgcctccctgaagccagatggcaggaggagtgggcaggagacccggagaggcctgggcacctgtagacatccactggtggatggtggggtcagagttgggcccttcagaagcagcaaggagtcctctggtcattctatccccccagcctcattctttgggttgtaccaggggtgctgtccccctcccctacttgtccttttgagctccccataagggtacacaaagtgctccctgagaagtgccagaccagagccttggagaggaaatgctagaaagttccaggggtggcatcgctaaggagggctccttaaagaatgagagagctactgggaaggtggaggtgagcagaggctcaacgaggggtggatgacagggcacatgccagggcagggagcagcgcctgctggagaggaggcttcatactaggggtaggaggagaggtgcagttggaaagggaggttggaatcactgtggggagcctgggatgccctgagaggaatttggatggaggggtagtagggagccattgaagggctttgagcaggggaggggcatttagaatcagcacatctctttgctgattgatttgaagcattccatacccacaaatgaaatcctgctggacagctctgcttttcagaagattctttttcctccctccctccctccttccctccctctttccttctcttccttttttccacaagtgtttactggggccctactatgcgccgggcagtgtagtccctgggtggcagcagcgaacacacaggcaaggtccacttctctggaactgacattctagttgggagacacaggcaagtacccaaatcaatgactgtgcggaacaggatgtaagatgggtattctggcagggagagatgggggatcggcggcctcagccttccttgagacaggaacacttttcccagggttgttgaagccactgtctctctcaaatgtgctggttagggcgcaatagaaaaccacttcctctgctgtgggaggagaagaaactcatcccgaagccagctgcaggctgaagagcgggttcaggtcacccctgtacagcaggacagggccacacacacatgtcgcggcccggtcccctcactgcgttgggagtccggtgtccccaggagccgctggatgggcccttgtgcaggcagatgccctgggtcctggccccacttgtgggagctgtggcggttcccgtgcatccttgtctttcacgggggaatgatgaggacttccctcctagggccgtggtcagggctgaagctgagacgcaggccggattacgatccacagggtcatcctcacaggggttttcgaaggactgaccgtgctgccaccatgggggacctgaggcccttctttccatcactggggtcatgactcccagagtggccttctgggggcatgtctggcctctccctaccctcacaccctggcgtgtcatggtggaacccatggtctctgtctggggacatcacctttcctagtcattcaggctgccggggagcccctttctcctgttgccgtccttggcatgcgggctctgacctctcttttcctggaactttttctcctgggctgtgtttttcaggtctctgaacctctggtgctggcccaggtgagtgccccctccaatcctgccagtgtgtgagctctgttctccctcttccacatgggggatgcttcacagcagtgagggcgagagtcttctcttctttctgtgtgtccccactgaagaaggcggggacacctggccatgttgtggagcctttcctgggtagggaaagagcgctggtctgggttgggagatggacccccagcactgcgaggtccccagacgatggctgtgaaagggtcccgaagaattttcagcatgccacacacaggatgtaaagtgttggcgctcctggccagcgcctgagcaccactaatatggacaatgtcctggcagggccggggtggtgaaacatgcttcttttgtgcatctgttcccaaggaggaattggaggcttctgaagacttaaaaaccacaccaaaacaaaataaccagagaaaatgtttccctgtgctgtggttctaagagctgcattgctttggggaagaagggaaggcaagaaccccctttgaaatcttttcccggaggaggtgggggatggcgtgggtgcccatggacatgcagtccacgtgatggctgccacgtgcccttgagcatcctcatcccagaatggcccagctgcgcacagaggaacagcctgatcccctcagctgcgttgagtcttgggagagggagagccaagctccaggtgtcgattgaaactctgagtcctgctcgtgcaaggactttgcagctgcgtgactgcccggggcgatgggtgctaccacacttgtctgccaggccattctcctgacaatgttcttgtacatgcagctgcagctggccccagatccccaggtcccccaccaccaccctggcccctcactgctgacttctcctccatctcttgccattcttgcatgcagtcttgtccccaagacaagtagggaagatggtgccagcctagtgggctactttgtcctgagaaggtcatgttcagcttccccaccatccaagggaagtctgtgcccctgatttgaggggaagatgcattttctaaggttacttcaacttatggtgtcttagttatcattcttagaagcaggctcttaagagaaggattctggtatacctggtttatttggagttgtagggaagggagtggtgaggtgagacgggaggaaagcacccataaagggaggctaagagagtcagctgcccccgagaacaactggagcttcatccctggggggactctgggagctggcatggttatcccatcccagagaaaggaagcagctctaaacaccaattgctggcagtgccccactgagggttccttttgcactccagacctgttgcacagctgggcaaagtgggctttggagacagaaaaccctcagttaaccacggtgctggtggttggaaaggatgtgtgcaccaaaggggtaagggcaccgggatttgagtgggaatcaacaggatctgccctacagagatgggggtggtaagtgctgatcgccatgatttctgggggcttaggaagccttttctgtgtctgtatgattttgtggttaaacatgaatgctgatggctgaaaggtgtgtgagtgtggtaaaatggatacttctaggcagatcacctggctgttgtcagatatcagtgcctcactgggaatgagttgatcagatttcatgctgagagcagtgttgggtggggtggagcaggggtcccatcctccggctacagactggcaccagtccatgccctgttgtgaaccaggccgcatagcgggaggtgagcagcaggcaagagcattaccacctgagccgcaccttctgtcagatcagcagcggcattacattctcacaggagcaagaaccctattgtgaactgtgcatttgagggatctaggttgcgtgctccttatgagaatctaatgcctgatgcacctgaggtggaacagttttgggattcctgcccccgcccgccccaccccccgcccccgctgcattggtccctggaaaaattgtcttccatgaaactggtccctggtgccaaaaagcttcgggaccattggggtagagggcaggacagaggctgcctcttggaggatgaggtcagaaatgggcgtgatggtcctggagatcccctgagtgtatcctcaaagacaagggccagtgtcctgtcctgtcctgtcctgttgatgccagcgtccacgggcctgagacagggagaggtcgatggttctcccagctaagccttttagaatggaggagaccccagaccctgagccccagggatgagcctgatctataaccagtcattgaaaatacatacagtgaaatggaagtttctgccattgagcaggctcttgctgaccgctgtaaagataagtaacggcagttttcaggccacttaaacccttacctttggggtattaaggggtctctgcagacagtaagtctttatcgggaagtgtttactcataaaaaaacacagtgaagccggggagagaaagcacctcagcctttatggcgccacaacccatctgtaacaggagctgcaaatcacctgtgggctgcagacgattctgcccaaaagttgggggcggaagtgagagtaaaagctgacttgctaccatgcagacagcattgcctgccccgccagccccctccctccaccgatagagggactgtgctgccgtgtgtgtggctcagccgtcttgctgtggctcccaagtaccacgggattgagcctgagctctgtggtcacgtgccccctggcccacctctctagcctctgtgcctgcgcacctctgacggtgctccctgcttccagagtgccttcccctgcttttctacccctgggagggctacccaaatgccctccccataccagttagagtccgatcagtggagtagaatcaccgtgagagacttggaaccagggtggtgataggatcagctcctgcccagtcgtgggagcagtgatatctctacaaagccacggtctctgcctctggtgctgggctgaagtcattgtaggtcagtggcattggcgatctgagggggtgttaggtgtgacgtgggggagaacaaggacaagctggaacccaccaggatggttagagttcacgcctgccttcctgtacttccagcttcatgatggataggtggatgcacatggggttggaggtgggttgtatgaccctcccccttggaactatatccactcctggctctatgggagaaagagctggctccaaccctctttgccccacagatcagtgatgatgtttggggactgagggagcctctgggatcctacagtagcagttccaaaccttttggtccacagatccctgtacacttaaaaattactgaggaccccaaagagcttttttttttttttttgagactgagtctcgctgtgtcgcccagactggagtgcagtgcagtggtgcgatctcagttcactgcaacctccgcctcccgggttcaggtgattctcctgcctcagcctcctgagtagctgggattacaggtgcgtgccatcatgcccggctaatttttgtatttttgtagagacggggttttgccatgttggccaggctggtctcaaactcctgacctcaagtgatcggcccatctaggcctcccaaagtgctgggattacaggcataagccacggcgcccggccccaaagagcttttttaatgtgggttatatctattgatatttaccttgtttgaaacttaaaaaaatgagaactatttaaaatattttgtcttcaaattcatttgaaaataacaatgatacaactattatatttatgaaaagagcttctccaaaattaaaaaaaaaagtaagaagagtaggattacacttctgcaaatatccttaatttctgtcttaatggaagacagctaaattctcatgtctacttctgcattgagtctgttgcactatgttgttttggttaaaatatatgaaggaaatccagtctaatacagatctagagatagaaaagaggagggtattttaaaagccttttcgcctaatttggatgttctttgatgctgcaccaaaacacgacattatggaatctgaaacagatcaaaggccttcccatgctgttggttaaaatccatgggtctgtcttgcactttgaatggatatttttttacccatgcgttattttgtataaccgtgcatcagtcattcagaattagaagcccacatcttccaaattagaagtccagatcttccaaagctacactggaaaatacagagacaatgagcgaggaagacaaatgaggttttaggattattatgaaaatgtgactttgcccatctcttgagaggaccgctgctctatgccatccttcctcctaatcccacatagatttctgctgtggccagccctcacccggaaccacacagggaagtgcgtaatgtcagcttggcgaagtggcctcggtatgaagccacccccactgcctccgtggggtctctcccccagctcccagccccgcagtctggctgcgcttgtgccctgaaggagcaggccatgctcactgcccacctgtcaccccttccatcacatgcccatcatgacaggccccctcacttcaccccattggccccgctgatgagctcgctgtggaccatcgggggatctcctgcctcctcctcttacagtctcatcaccgctccgcctcagccctttccttccctggcttctaagctccccttgtgttctcctgcctgccccttttccctcaggtgaaggtcccaggctttgtcctgagtgctcttctcttgtcactggaaactcatcgcgggggcacctgggtagcaagaccctctcagctgtctctgcccagacccctatatctgtctcatcagctccaactgctcatccactggcctgcctggtgctggatgtcccaggctgtgtacacagtgcccctccccacccatcccacatcacctggccccgctccagactcctttgcgggcgtagcgtcctcacccactcgctcgtatggagcaaacctaagagacccggccggcctgagaaccatgtggcagggctgaggggatggatccgcacgggaccttctgaggacagcttcctgaggcctccatgtcctgccattacacatgaggcccagaagggtcccctggtttgcccagggcctcacatgggatttgatgggatcctgtttctaaaccccgtgctccactcttgcctgtgcttttccagggcccttggttcaagggccctgtggccctgtgcctgcatctggttgaggttcacagctgcctgaacactggggccttgcagagaggtggtgggaggagctggagagctccaaggagccccgctttcatccccgaggggtggcagtgcctcttccaagcctgcagggcaggggtgtggagggtgaagtctaacaccaggacagccagtgggtacatttagggctcttgtttgccatccaagaagaagcctccaagaagaaagtagcatctgcttctctaatcagcccctgggaaggagtgtggacgtgccagtggcctgagacagagataaatggtgtgcaccgaccctttgaactggctgggcctagtctgggtgcatttagtgcagacaaagccaagagccaggaaggactgaaccacacaaggccgagctgggccaggcactggcattggctaagtccttaccgagtaggtgctgggcactactggaaggaagcaagagtgcgtctctccctgcccctcctccccaaaccccactcccaacacgaatcactcctgagtcttgataatattccgagtgagtctgggccccaggcgtgtctctccagggactctccagtcccccagtgtctccgcccaggccctgtgccctgccaaatcccaaggctccttcaaggccaaattcagtagtcaattctgtttcattcaaaaggcatttagatgtttacgaaaggcctactggttagcatgttaccagggccacccggctagtaagtggtttgagccaggatttgaacttgaatccttctgagcctcccccaccttatgctgataacctgcttatctgaagcagccgcagccccccgccctcttttactgatacccacttctaggttacgtgctgggaaacatatcattttgttagaatagtttctaagccaagaatccagacgcactgaataagggcctagggggcttttatcatacactcttagtgcaaagcctctgagatgtaggtttaggggctcaggggcttcttggctcttgttgggttcctggctgcagctggtagagttgccttttaggagtgagtgacctccagatgggtgaggtttgtgttgcactttaaaagtactgatagtagatattcagagtgacagagtgccactaatagagattttttttttttttttttttgagatggagtcactctgttgtccaagctggagtgcaatggtgtgatcttggctcactgcaacctccgcctcccaggttcaggcaattttcctgcctcagcctcccaagtagctgagattacaggcgtctgccaccatgcctggctatttttaatatttttagtagagacggggttttgccatgttgaccaggctggtctcgaactcctgacctcaggtgatctgcccgcctcagcctcctaaagtgctgggattgcaggcgtgagtcactgcaccccaccggtttttgtattttctatccaccctcgtttttaatcttcctttgccattcctcctttagcagctgaaagccaatggcaggcacagagaattctataacctgagccttgttctcaagaaccagaaatctgaaggactttgccacaggcagtttattcatctgcttgcaggcatttaccagttactgtgccagtccgttatgctggggcaaataccccactggccaagcccccagggagctcaccagctaagaagaaggactgatcagtgcaaggacagcatcttagtgtggtaacgactccaagagaagtcatttccagatacttcatcctgctgctgggggaagagaggcagggaagacttcttggaggaggccagacccagcctgagctgggtcttgagggatgaatacgggttcactaggcagaaaagtggggcccagagaacagaatacgagcacaggcagcaggatggccagccgccaaggccatgggaacctggggaaggttggctgctttgctggaggaaacctccagcagcatctactgaggcatccacccttagaaagactgaggctgatgaaggcaagtgaaggaaaggtccaggctggtcccttttgccctctgtctggttttctctgagctaagatagttctctctggctcccttaaaatcaggacagtggagcgaaggtgggtttgggggccaatttctcctcctctcagccatcccaggctttgctttcttgccgagtctaaactctcagctgtcgccctcgtatttgctcaggggcccctgttagggggactgtgcactttcatccagctggacgccggagttccctggaagccgagagggttaaatcaccaagccagctggtgagcattagttcccccctctccaggcagtaacgtcagaggctgatgctggcggcaaagaagctggtggcaggaggaggcggagagctgccttgaggcactccgggggtgggctcctggcctgggaccctgccccagcaacccccaggtaggctggctgtggatgtgtgggctccggacaccctgcggggacggctgctgtccacgccagtgtgtggacgtgtgtgcacaccctgtgtgtctgtgtttcttctctttgtgagagttagccttctgctgtggcaaaaacttcagtggagaaggaaagagtgagcgctggagagggtagctttttttctagtgggaaggggactgacttctttaaacaaacactcaagtgttccagtggccacggagcaggcagatgtgggccacactgcatcttccagggtttctctatgccacttggggtgcagtcttgagtggccagaggagcagtttgctgaggtggcttaagaacatgttttctcatctgtctgtgaccaggaggcgtttcgaagggcttgccatgtgccgactcagtaactagtgtgtggcctcccggtggtttcagatgccttgccaaggccgacccacccacctcctcgaggaaatgcaaaaagtgttttcagggcccagaacactaagcctgggatgatctgctcctccctgactggcagcctgtcttgcgtgggcggctgagctcgcagccaccaggacctgatggggacagtgtttcctggggcctctgtacgggggaggttctctcgagttgcaaaggtgcagatgcgccaggagggttcttggcccctaggcttcatggatagagtttactaggacaagcaaaggcctggtgtgcgatctgttttcctatttgactggatgttgggagaaaaatgtccaaattagggatgggcccatggctcagctgagcagaacactgggtgaacttctactgtgaaagaaatagcagatccggcggacatttatgggcgacagagaagggtagctcagcattgaggagggagtttggtctcattctggccgagactgtcaaatcctcggatgggcttgtaaaccagctcctggcctagcctcatcaaacgtgaggatgaggaagagagagcctggtgggccctggggaggggacctgcactctcagtgggacacctggtgaccagtaagcctggtccactgcccttcctcaccctctcgtctttctaataaacagaggggaggtgcctgtgcatagacttggggactattacattgactcagaaagaccctcttttcccttttgccccaaccagtgctttacgaggttgcctaagcctgtgctgcgacccccagaggcaggtgcaaccccattttacagatggggatgctgaggctcttcaccagggccgcccagctggatggcagtggggtgggtcacaccgagcctcctttcccctgggctgggctgccacccgaggcccccactatgtgttcctgtttgcctttgactccacgggggccgggagaaagtggcactggggatgccaccaggctgcttgtcaactggcctttgctgtgttccacacctctgacatggaggtgaggctgtggtggctaagaccgggcggtgggccgagttcatgttcctgctatgccagtgatagctggacgagacctagagcaaggctgtgaactcttgtggccttggagttcttgtctgtgcagcatcctttcgggtgcaaggattgttacaagggttgagtgagctgttatcagcgaagcactgaacagtgtctggaaggtgataaactcaacaaagtgtctctggagttagagcagccttcttgtggtccctggacccagcagtgtgctatgggcatagtgccctgcacagcgggtccagctcaagggacagggacaaaatgaccttttcagaagcgtgttaggaaacagcccgatgggccctaaggctccagaacctttgtgttccctgaatcctgaccctcacagggtccttgcatgaacttgacacaattaataccaagagagatggtgctgtccccattccacccctttgcatgtggctgaaggtcacaaggatagcaaatggaaatgcctccgcaaatcacctgtttactatttttctgattattaaagtgattgaaaatgtgatgactgtggaaaagcccaatgaacatatcattatgttcttccctgattccacctcccaaggatgaccctcactcacatgttagtatgtttctttccagttctttctttccatgccatacttcccttccaatggaaggttcaattaaggacgttaaaatacaacaacaaaacacacaaaagtaactccctgggcttttgaaattcaaagcttcagaggaaatggtacgaatgcaacccaaatggcaaatttcccatctgattttattttcagtacactctgaacccatcttctgccccttaccctagctcttcctcaggcaaccttgagtttccttctctaaggggaatcttgcaggagtggtctaggactgggaggctgagggggcattggaggagacacctggacaggtgtgcacagaggtggatgtgagaggtggatgaaggacatcccaacagggaacctgctcccaccccctgcaccccccgccacccggctgtgtgtttcccaggcgaggctgtgtttgacatgcagcggccgcacaccgtctttggtatgccgtttggtcccggacttaatgagttctgcagggacgctccactgtagctaaagatcatttacctgaattgctttttaatttctgccgtgggaagctgcccccggtgtgatataattacattataatttacagcaatcccaaatctataaatttagccatacagtggggggaagggactggagttgtgtgtggggctgggggagaaatcccccccatcattaagtaaacccacatttctgggtgcaggttccagtccctgggcaggtgtggaggaggcagagagggacatcactcgcccagtacacgctgaagtgtgctttaacaccacagagcattcgggctggagctgctagtgggagaggatgagagagtgatgtgacattctttctgatctgccctcttatagcatttttgctgtgggatgtggggagcacacagaagtgggtagcctggggacatctatggaatgcctagcattggaaggcagggatcggaatccttccctgattctcttatgggaagatctcccggctgtgggctgtggagaggagagctgggcctcagggtggagtcccggggatgtctctgggcagatggagccactccctgggagcttgtggcatgtgcggaagtgaagccgtgtgggattccgataggcctaggcgaaggcgcagtaccatgcaggccaagggaggggtttcctttctgcacccacaaaagggttcacattcctggtggccctgccattccacgtcactgtgtaatttgccgtattcctgtaaaaccatgcatggaccaaaattattcatattttatgggcataaaggcagttcattaattaatggaattctatggtgaattaactttatttaacaaagaaagaaccaggtttttctgattcgtctgctctggagatctaaacgttcatatcttggggggattccgttgggatgactttgtagcagtgggaggcagtatagcagctaaagcaccagtggaacccaggttcggagaagctaagtcacttaccccacatcacgtagctggtggaggagaaaaagaccctgtgaaggctgttggatggggaaggtaagtagggggatagagagggaggaagagggaggcagcaacaaatttactcgctgtgttgaccttgactgttacgagtttgccccttggccagggggactgtgtggagtggtgctctggcagcagccttcccccttacaggggtgtgggcccccaccctgatacaggtgattgtccctcgccaccccgggaagctgctgatcctcaggcccaccctctgagctttggctcttacgttcacgagcgctggggctcagagatggcagaatggcggctccagagtgtccctccaggtgcttgtcattagccactgccccctgctccatctctggctgtaagcccctttgggccccctttgggtctacaccagcacctgtcaaactgactctgaggaggtcagagagggcaagtcatttaccccaaatgacacagctggtctttgaggatgtaagcctgtcctgagggccttgctttgagataaggtgtcccacagcctgatgttccaaccaagtgggacatgaggacctgaactcccttgtcagtgacacacctgacaaaggatgtccccatggcatttctttgttgttgttgttgttgttttgtcttgagacaggttatcgctcagttgctcaggctggagtgcggtgacacaatcgtggcccactgtagcctcgaccacccgggctcaagcaatcctcccacctcaccctcccaagtagctgggactacaggtgcctgccatcacacctggcttatttttgtattttttatagagacagggtttcaacttgttgcccaggctggtctcgaactcctgacctcaagtggtccccttcccaaagtgctgggattacaggtgtgagccattgtgcctggcccccatgatatttcttatagccattggtactgccatgatttgggagttttgggagaattgaagcaagtacttagaatctgaaagaatgcatttcctgtttaaggagcccatttatcactcaggttttacaaatacatgataaagcccaaggaaggcctggccctgtccacctgtgcagccactcactgccctcacattaaaacaacctcacctggctgtgagtgtgtgcttggctgtgaggagtgtgcaactggctgtgaatgcgcctggctgtgagtgtgtgctggactgtgtgcgcctagctgtgagtgcacctggctataaggagtgtgctcctggctgtgagtgtgcatctggctgtgagtgtgacctggctgtgggtgtgcacctgactgtgagtgtgtgcctagctgtaaggagtgtgctcctggctgtgagtgtgctcctggctgtgggtgtgcacctggctgtgagtgtgtgctggactgtaagcatgcacctgactgtgagcgtgcaccggactgtgagtgtgcacctggctgtaagctccttctgcccagatgcctgtcctttgcctgctccttccaggaaagctgccttgatgacagccctccctccatgtccccctcctggtgcttcctgcagacatcagatccctgtgggtgtcttctgacaagtcttacccctgcccctagggctaagccccaaggccaggagatgtttggataatctggccagggatcacaggagcgctccttcctgtggctgctggttcgcagatggccttgcacaagccttggctgctcagagctttgcactccagctgtggcccagcagtgtcccagggagggataggatgctgggtgagaacaccacaggcccttactgctgggcacgatgggaggctgcctggtgacggccgcctttgttatgacagagcagagcgttgggccgtggccaggctctgtccagagacagctgcgaggcttccaacccggctgggtggggtgggagggagctgtggctggcatgcatctgcatgcacccaacttagcaagttcagcatggaggagagagggagagaggggagaagctgagacagagaggggctgagtgcatgcagctgaagcagtgccctcgtcccagtctgaatgtgccagagccaggttgggcgtgagggtctgccgtcctgtttacatttactcgtgcctcctgtactgcaggctccagagctggagtttttattcagcttctgatgtttatatacacagttttcatgcacaggcccagaacccagccagccccctccctctgctgctgttcgatctgggaggcagtgtgcgtctccacacagaggagaccgctggactgcactctggaggaagtggggtcccctccgtgtgggaccttgcttgaggtgggcagaggtgctttggagtggtggagatttttatctcatgtatggtctttcgtgtctaatcttggcaaaagatgggattccctgcattgccgttttacagattagggacctgagtttcagagagcatgtactctgcgtcacacaggttggggaagtggctttgaacccaggcccatgggattccaatgcctatggcctcttgaccccaggcctttcgggaatgatttgagaagcaggcagttcagtccctctgtacctgcggtccccagtgacagctcagagcccgtttcagatccgcctgggcaacctgcccggctcccgcttcctctgtctccccttcaaatgctggcacattctccatagtgacttcccagcctgccacatctccccacaccccagccacgcataaccactggcggctcccgggacaagtggggctcccaccatttcgctttcactgtgtggtgactcccatgggtccatgagggactgctgtgtccccagctcctagaacagggcctggcactgcccatgccagtggtttgttgactaaatccgtgaccggatgagtgcttcagggacctctaggcttccctcagagccagcccagaaacacaaacatatgactatgttgcccagacccgtggctgtcttctttcaggacagcggagttggcacagccaaacccgagtgtctgctgatatgcttcttgctaagtggtgagcccggcgtctctaagtagtgcctctgcctgtgagcgggtgatgaagagtcagtggggattcatacccatactgtgtgaataggatggctactattaagaaaaacactcagaaaacagaacaggtgctggtgaggatgtggagaagttggcctccttgtgcactgctggtgggaatgtgaaatagtgcagccactttggaagacagtatgggagttccttggaaaatgaaacagaattaccttacaatccagcaattctccttttggatttagactcagaaaagttgaaagtagggtcctgaagagatatttgcacacccatgttcatagcagccttattcacaatagccaaaaagtggaagctacccaagggtccattgatggatgaatgaataaacaaaatgtggtgcgtgatacagagggctgttatgcagccttaaaaaggaaggacattcggacacagcacagatgaaccttgagaacgttatgctaagtgaaataagtcagtcacaaaaggacatatactgttttattccacttatacgcggtccctagagtcgtcagaatcgtagagacagaaagcagagttgtgattgccaggggccggagggaggaaggagtgaggagttcatgttgaatgggtgcagaatttcaatttgggaagatgaaaaagctctggagatggatggtcgtgatggttgcggaacaacgtgaatgtactcaatgcctctgaattgtacacttaaaaggcatggaaatggtacattttatgttttgtatattttcctgcaagtttagaaaatgaaattattgaagagagcctgaggagcaggtctaaacacccatggacttctaaagcttccgtgaaccttgggtcctcctggttcctccaccatcgatgaccagtgtgtcaccccctggttcagtgccctctttatgcatgagagcagcttgctgggccaaggcccccgggccaggtggcttctctgaggaaacgttcgttagttctccccgctctctcaccagagaaagcacctgtgaggccagcctcttgtctgagcccctgcccggagactccgaggacattcgagctctcaaccccagacagacgctgagggtggaacctgtggaaaatatgttggttttagaaatttaaacctgatttttttctcctctgtgaaaagaatcaaaatccagcataagcttattacaggcggactgaggttattttgggaagtagcaattaaaggttttatatttttcctctcccttttgcccttgcagcttgcacaggtctgtgaagctattaaaccttcacccaacccacagcccggaggaatctgccctgccccgtttctcctccagttcagtgccttgggaaagaaaagaaagttaaattcgtattaattacagccaaatccgctcagtaagcacttgctgaatatgcttgaggatgaggtttaaagctctcctccaaacaaaacggtaaaatgaaaggaataatttatttggtcagacactataatttgccacgtcattccatttctcttgttactaaaatggattctctgctgaggccgtgacttccaactccaaaaaaaaaaaaaaaagatcatccacagccactattcctcacaatttctctgaaaggtcctccttgccccaccacgctgaagctaggcccagggctcttggaagaaacacacagcacttgctcctgcacactgacacactctgtcacccaaaatgacatgctgtcactcatactcacacaccacatgctcacagtcacacacgtacgcatgcatgcacacagggacagccacgcacctgcacccatgcacgcactcactgtcacacacaccatcaccacgtgcacacccagcacccacacgcacccttcatacacttatacacacatgcacacattcgcatgcacacgcctgcactcacacagtcacagatacacagggacacagagccccaggggcagtatgcctcagagcatgttagtacttccataaacgatctctttccacatcatttacagagtgggcgcattgtgagtgtcttaagtttctgaccagggttaatgtctttctgaggctgacttagctcaaaggcagtgtcatgattaagatctcaggcccaggagttggacagtgctagggctgagccccagcccagccacttaacagctgtgtgacattcgtcaagtagaaggagttcccccagccttagcttcccatctctaggtggtgataatgaagagttgacctcatagggtacatctgaggaataaaccaaggctgggcctaacagctgtttcccaggaggttctcatctgagttggctgatatcgtcattattatcaccaatccgtaatgctggtgtcccatccgttctccaagtgctgacttggctgtagctgtgggcccgggcctgggagaaggggactgtgtccaccagggtggctgcaggagggcctatgtgggccttgagatcctgcttcctggccaggacccattccttcatggggcaccttccccagttctcagggctgggggcactcagagggaagtgcagggctgagttcatgtaagttctgcaagcaagttctggtccctttgagtcagcactgtgctaggcattcagaggggagggggcgcatgttttgctaagggcaggtgtgcctgcgtgtgtgtgtgtgtatatatgtgcacgtgtgtgtaaagtttccttagaagaggtggcttttgagcagaagcgccttgggtgaaaagtgtagcaggcttggaagtcagagtgtgctgctgagtgagtgggagtctggtggaggtggtctttctaaccggccacaagaccctgggcccgctctgcccctccgtctgagtacctgccatcccagggggtgagtgctggctgggctcctggtgcagccacctgcaccgtgcagtgccatcaccgggtcgtgtcttgagcccctccttgccctcctgtttgtttaagtggccttggcctagctccctctgccctctgagggtctcactgtgccctagccctgtgggcatagtgcctggcacatagggggccctcagtctagggcacagggtgagtagaggaggaggttggccctgctggggcagcatgcttgccaagcctgtgtgtgtgtgggtttttgttcatgcttctgctggtgtgtacggagaagtgggcccagacacacacagacatacacggatgcccaccaggccccacgtccatccatgggaagggcagcacatgctggtaatgtgttccccaaacagcagcctcttgggctgcctgagctcagggcagagcagggacggggcctgtttgttggggctccagcagggcaggggagggcagagagtgtgagccctctggagaatgtgcaggtggctgggggagtgcccttcccagaacctcatggctggacctgtgagactccctgcccgtcctggtccccaccatgttccctctgttttctgggtgactctctctgcctcctttctctggttctctctgtccttctctgactttgttgctgtctctctcactgtttctttgtctgtccctctcttctctgtcattctgtttctctcacttggtccctgtcctggatcactctgtgtctctgtgtcttctgtctctgtgtcctggtttcactctgcctccgtatctctctctgtctcttttttttttttttgcctgtttggtctctttgttttcctgtcattctttttccctcatttggtcctcagtttcagctctgcctgtctctctctctgtttctgtcattctctctctctctttctgtcatcctctctctttctgtgtcattctccatgtttgtccttctgttccctttccttgtctgtctctgcacaccaaggttgctcccagctgggaggttggccctgtcccgatgcctggcccttcttctgccaaaggcatcttggaaagacttgaggttattctggtgcattcagtccagcgcttgataattgtactaacctggcaattggcaagtgctcctcccaaagaaaaccctcacagtgcagggtgctctgctgtgggcaccaggcctccctggaggttacagggctcacagtgtggggacaggttgtccaggggcagctggagcatccactgggatgctgatgtcaggccagagggcacctgtgttttcctgggtgacaggccacaagcaggacagctcacacccaggaaaataaaagccaggctcagagtacttgattccttattatggttggggatagtcagtaaaatagtagattccgttttgagagcagtatcagtgctctggggcctgtgaagggagctttgggtgtgctctctggttgtcacacagcccccggtggtgcaggttattgtcccagtctgtaggaagggaggtgcctcctggtctggtggctgggagtgtggctttaaatccagctctgattcttaccaactcacccaactctccaggcctcagtttctgcatttgtctgtgggttgttgtgaggattcagtgaggtcatgctcacaaagtacctgcgtggagtaaggatgaaatcaatggcactagtgtcagggctgtctcaaagattatcacttagtctcaggggctggagtgccagtgggattacctacgctggactgcgtctgctgcccacccatcgcttcccatatggggcaccacaaggcggggtggttcttggtttgttctttcaatcagcagtaaacaccaggtacacagcatggtacttgcttggtggagaggaatcagtgtggattggggccccagtccatgcccacctggcacagggtgcaccatctggtcccacaaggagtcagagccccggccactgaggacttcatctctgtgtcttaagagctcatcggtcttgaatttgccccctggctgcccctggcaagtgctggggcttatacccaggagacctggggtcaatgacttgaaaatgaagtacccagaaccccatcaccctaccccacagacccagaattttagagagatggcagagagaagaaaggaggtgctaggaagggttgcagaggctgcctgaggcacggggtggcaccaggctgacccgggcagcagggcctggggctgaggcccaggctgtgtcccttcctgatgcggcctgagcctgggcactggtcagtcatccctgtgtggcggagaactctaaacctcgcttgcttctcctctaggcacactcgggcccttgtaagggaacaatatgtccctctcccacccccagcccagggctgagcagacctcaggccctttgggactgctgcttctgcccagggtgaggctggctgtgactcttttggagtgtgttcgggcaatgagaaaatctgtgactttctgctttgagaagagacaaacctgggctggaaggtagctctttccctgcaggctgtgtgatgggcaggtcacgtcactccctgagccttaggccatggagtcttcaagaggacgggtgggctgttaggtggcagcagaccggggaaggtctggtcctccacagggcagcagcaggtggctcaggggctctgctggtctctttcctctctgagacccttcctcagccgggtgctggccaagaatagctggaaaggaccttcctgcctgaaggatgggatgtactaggttgtgctcagggaccaggtcagacatggaaacttggggcctggagcccagggacatggctgcccatggcctcttaccagcctggattgctctgggactcttcctctcccagcccacctccaggcctccttcattttattctcctcgcctttgcctttctctcctgtccaccctcctgcatttcctttccctgtcctagctccttttctttcttcctcggcttgtgcctaaggcctccagggcctacgagatggtgtttgcctgttgcggattctcagggccagaggcagtatagctgggggcctggcatttggggagggttcctaagggctgtaaccccagaaacattccccctgcagagggcagtctgctccctccctgagctaggtgagggtctgcaatgggtccagaacatgggatctataccaagttctgggaaccagctcaacaggcctgggcctgcctctcacatctctgtgccctggctgtgtgaccctgggcaaggcactgcacctctctgagacctgtttccccatctagagcacccaaagaatcaggctgcctttgcagggctgtcatgagtggaagcctcatcccccaaccttggatgagcagacccctcaaatgtgcagctacccacagagattttgactgtccatggactttggtgttcagacatcacaacagccacctcccaccaccgaggtcagctcctgccacgcttctggtcatcaacaggactgccaagactcctgggctgggagcatcctttagctccccaaacctgctagctggcaggaaacatggaggccatttagggacattcagcatttgaacttaagatttgttttcagtagaacccacaaacccagttttaaaattcagttggaaaccaatccacaagtcttcaaagtcatcttagtgcagttcttaaacttgcaaagtaacacctagtgggtctgtcattggcttgtctggctcagctgaagtcagagctcacagcacactggcctaactctcagtctggcttcaaagtaacctgtgatgctgctgcacagctctgggggtgctcagtcccccgcccccaaccgccacatcatcttgcccagcatcctctgcacaatgtacaaaaatgttttcaaatgcaggttttagcatgattcaggtatggtgaggccagtagagcaggggagagttgccattgaaaagatgatttgttattcacacttcccagtgggaggacaccccacaccatacaggactacttggggaagcatcagggtcagtcagtgaggcatccaggggagagcatgggaaggaggcttcattggtttttgtggaagggctggcaaggcagggccagaagcttagggttggccggtttgaatgattctagcagtctctgggccataggggccatcgctctttgtctgagacctggccctggggtgttagggcagaggcatgtggcctcccagagtgtagagccaggtaggggagatggtttggagtatggactctggatcagttggtttgcacacaaaaaggctcactcctgggtgagtgctttgctgtcactcagccagccttgggaggggctgccttccctcagtcatcgaagccccagatgtgagaacattagaaacacagaaaacaagaaagtagagttaataccaatcatcaggagctgtgagatggggtctgggttcttgcagacccctttgttcacagaccttttcctggatttcttttgcacctggtttcagatgcctgtgtccccctgcagtgatggctaccgtgtcatccaagtcatcactaactttctgtggggggttatgcacaaggcatgatcctggtgttgttctggtttcaaggctgagaggtcgtgtgtaaggaccttctggtgcactcctcatgtggcatttcaggggctctgcaccccatgttctctgggctaaacccacatgggtcctcactcttcagctcgttttccactgtttgtgtgcgacatttgggtggagttgtgaccaggcagccttatcatttttggagcaaacattactattttgataaattgactggtttttgacaaacacaccaaactgaaaaaaagacaatctctctgagggaaggaaagtgatcatcaaacagtgaagaccaggatttgggggtggtatgggtggagccaatggtcttttagtggcattgctgtactcatttgatagacaaagaagctgaagcaggaaaagaagcttaggcagtgccccacagagctgcccaggagctgagcacaaccaataccaggctttggtgggagttgatcagatgcagccttagggaagattggctcccgttgttgctcaggtgaggcgtcagtcctcccaggccccagccagtcacaggcaccagactttttttttttttttttggagacagagtctcgctctgtcacccaggctggagtgcagtggcatgatttcggctcagtgcaacccccgtctcctgggttccggagattctcccgcctcagcctcctgagtagctaggattataggcgcccgccaccacacctggctaatgtttgtatttttagaaaagatggggtttcaccatgttgaccaggctagtctccgactcctgacctcaggtgatccgcccacctcagcttcccaaagtgctgagattacaggtgtgagccaccgcatcggcccagactatctgttttgaccttacatgtaactttgctctggaagtatcttaccttggcatgtctggtctttggagaacacacatatgcacagaaagagatgtgtgtgtgcgtttgtgtgtgtgtatgtgtgtgtgtgtatacatatatatttaaatatttaatattttaaccacaccaaagagatgtaacaaatacatgtacctccatgcagcttaacttttttttgccatttttagtctgcagcatgtcaaggtgggggatgttctgccctggatgcagacattagggagtgtgcattgtttatagagaattcaaaagcaataatcaaactggctaacagtttactatatgttattactatgtcctggcaattttaacctatgtcagtgatgacacagccctgactggggtagtctgatcccatggcccccccatctgggctgttaaaccctgatttgaacccctatctattgctcttccttgattccatcaccctcttctatctcctgccccccaggagtagcgtcagaccagagaatgttgtgtttgtcatccctctggcatatttccccgtttttactttatatgtaaatgcccatacagggtgggtttcaaaagttgattaagatgttatcttattatgtgtgtgtatatgtgtatatttttttctgtgcacaagattatgtttttgagatgtattcatgtcgttacctgaagctctgatttgctcattgaaagctccgtagacgccacaataaatgaatattccacagccgatttctctcctcgcctgttgaggtaatttacattatttacacttttttattgttgcagacattgttgccatgggtggcacacctccccctgtgtccctgtgggagaactttcttcacagcaggggtttataaaatcaatttcatgggaaacagcatttaaaaagatgcaatagaaaatatcacaatacattgcaagtattaaagttttgtcagactgttttatttatgtgtgtgtgcctgtgtgtgtgcatggacacctggagcacattgcaacacaacgtgtgtttctttctctgtatcacactgctcatttagaagcccaagcccagtggaagggtagatgtgctgggctgttgggtgtacacacttgtagctttgttagatattgccaaattgctctccaaagtggctgcacagtttcttcagcctcacttttcatgaaatggttgacaatattagactggaattttttccagtctaatagtgaatgatcttagtttcatttgcattctgctcttttgcaacgtattggacgtttgggctgcttctccctgatttgcctatccatctcctttgctgagctttttactgggttgctgtgttttcctgaaagtacttttaagagatactaatcttaaaaatcttaatcttaggccgggcgcggtggctcacgcctgtaatcccagcactttgggaggccgaggcgggcggatcacgaggtcaggagatcgagaccatcctggctaacacggtgaaaccctgtctctactaaaaatacagaaaactagccgggtgtggtggcgggcgcctgtagtcccagctactcgggaggctgaggcaggagaatggcgtgaacccaggaggcggagcttgcagtgagccaagatcacaccactgcactccagcctgggcaacagagcgagactccatctcaaaaaaaaaaaaaaaaaaaaagtcttaatcttgtttagacatgttataaataatttctcagtcttctgttggccattatctttgggtatggcatggtttattgagacaacggttgtacattttaacacagtcgagtgtatgattcttttcctctgtggcttgtgtttgtattttaggaggttctttctgtccttgaggtcatacggctattctcctattctaaaatttaaaaaattgtgcatttacatgtagcttttaaatttagctgagactgttttgtctttgacattatgtagagatcaaatttgttttactttatctatgtgaataatcgtctcagtagcaattattctatttcttaatttttaatgatttttttaaatgcaaaaactgtcacatgtcaattttccttgcatatgtagctctgtttccgggctccctactttgttcctttggtctattagtttcttctggtgccatctcacattgtcttaggtcttacagctttctgttaagcatggcagggaaaatcccctcatgtgttcctctttcaaatggtcttggctctttttctgcccttgttctaccgtgagaactttaggatcaacttgttagagtcctgaaaatccctgttggggttttgattataattgagttatttgtgaatgaatttggagaagattgccatctttgtcattttgagttttcccgcccatgatcacggcctttctccctatacttattggttattttatgtctttttgttttatcatttgtatcataagggtcttacacattttttgttacatttattcataagtattctgaagttttctttgctgctgtaaatgttatatatataaaatatacacacacatatatatatgtttaaaaattacagtttctagttcattattgctggcatctaggcatgtagttaaattttatatattgattgtatttctagcaatcttgctgatcttttactagttttaaatgtgtccctacaaattttatagacattttatttaatcttgtcatttacaaatggtgatagctttttcctttctttccaatttttctctctttagttattttcttgcctcttactgtgctgtctagattagcactgtctaataaaaatataatgtgaaccacatttaattttaaaatttctgatagccacattgtcttagtccactttgtgttgctataacagaatatcagactgggaaatttataaagaaaagtcatttacactcatgcaccccataacaatattttggacaatcatgaaccgcatataggacagtggtcccataagattataatcccatgtttttactgtaccttttctaggtttagacatgtttagatatacaaatccttaccattgtgttacagttgcctacaatattccctatagtaacctgctgtaggccagggtcaataggttccaggaagaacctatatcatatagcctgggtgtgtggtaggctatacatttagtgatgcacctagtgatgcatatctcagcacatatccctgtcattaagtggtgcaggactgtatttctcacagttctggaggctgggaagtccaaggttgaggaacctgcatctggcaagggccttcttgctgtgtcattccatcagcagtgagactgacccataaatttccattcttctccttatttagttgaattttcaactaaattaacctcataacatgtcctaaggaatgcttccctttccaatattcaaatatttgcataccgtatggattatcttcaaatattttaatatatttgtatatgttcatatttgtatatgtcaacgatatgttaaggattgttgtcaaatatttgtacatgttacaaagtttggaaaaacccaaactaccaaacctcagcctgggtttgttggtttcttaacgttttttaaaaaattactaattcagtttatttaatggttagaggtaattccagttttctatttctttgtgtcatctttcattcaaccaatcaatctacctctgtcttcaggaatgtgttcatttttcttgtttttaaatttagcagcagtgtttataactatatcccctttttcattctctatgttatttatttgtcccttccctgtttcttggttagtcttcacagagttttattttttatttatttttttgagatggagtctcactcttgtcactcaggctggagtgcagtgacacgaattcagctcactgcaacctccgcctcccaggttcaagagattctcccgcctcagccacccgagtagctgggattacaggcgtgcgcaaccacacccagctaatttttgtatttttagtagagacgtagtttcatcatgttggccaggctggtcatgaactctggacctcaagtaatccacctgccttggcctcccaaagtgctgggattacaggcgtgagccactgcacccagccttttcacagagttttattaatccttgcaaaggtctaattcaggagttggttgattctctttctcgtttctttgttttctctcttacaggtttcttttataatgatgtcattatatcgtttcctttctttcttaggtgtgctttgacattattttcccaattccttgaattgggcacctatgtgattgatttttagccttcctccttttctactcttcttgatataaacatatttctaagttatgcttcagttacatcccgcacattctgaaacatagcaattttattaaatttgaagccttaggatccacgtctttgtacagttttgaaaaatttccaccaaccatctcttcaaattatgcctttccccgcttctgtccattctctcttcctggaactttcttattctgtcttccatgtgtcggcacctggtttttatattacccatgtttctgttatgcattttctaatcctctctcaagctgactttgataatgctctttgtggtatctggtgactcttgtgtgtgtgtctgcatgtctgtgcatgcacgcgtgtgcatgggcactttgtaatttcagataatgagtggagatttatttgaaggaaacctgtgcagcatgagttaaggctatccctccaaagtgcttttctgtgtgactaccaggttcttcaggagtagcacagatgtgagatcaattttgtattcttttgatagcttaggggtcctggaccacatggggactataaatttgaaccatcactcagcgagaaggcaagcatgtggctacaaacactcagaagatactttttcagctcctctgcccgtttcccagcagaggcgtgagaagccaagcatcttggtgtgtccctgtgctggtgggcattgaagggtatccagcctgttactagagatgcagcgatcccatggcctttgcacgtgggggtctcggatcccccttcttgtttctcccagactccaggcctcctgtcctctcactgcatggtcgctaaaaagagatccactgggttactgaggccaacacccactcctgggctgcttagtgtcagctctctgtctggtctttggggtccctttgttatctggccctacgtggcctctttccttgccagctgaaatgtgcatctaaacagatgttcattctgtttattgagctggagggcctttagtttcccttgttgatcgtatggctgaaactcgaagtcgctacgctgttgtttttcctatgcaaaattaaaggtagaaaatgaagttgatggagaaagaaacacacattttgagaaagaactgtgtaattattatccactccctgcaaaagacccatgaagtggtcggttttcagaggaggaaatccttggcgtctgccttattccaaaatccactggctaagtcactcaccacctaagccctcttggacgaggaccaaggcttctacgctccatactaaggcacaatgtgagggattctacagagggcctagtgaagagagaggagagggcccatttcatctcactttgcctggggccatcctgcacgctgctctgctgtgtgatctctgcaggacacttgaccattttgtgaacacatccttatcagtgaactgctatttttgtaatggcagttccccccagacactgaatccacaagcttaaggtaagcttaagtcaagagtgatgacttcttgactattctagtttttctgtcttcattcatttcaacagtatttaccgagggtcttctgtgtgcccagcactgtcctgggcactgtttaaaacattgcttcattgcctctggtatgccaggtgctggcaggacagaggagaactggacttgccttctagcctgctcagagtatggtgggggagaggcctgtccctagattccagtgcagagcagaatgcgtgggccagttggggtctctggttccccagttgggaggaggaccattgcaagccagtctggagggtgtgtgtgtgtgtgtgtgtgtgtgtgtgtgtgtgtgtgtgatgctgggctctgggaaagataaatgaaggcccttctccttcactccagttcacttttggatgaactgttggaggtatttggcttttggtaagttttttttaaaattttattattttagctacagtaatttacatgattcaaactcaatagttacctatttgtcaactcaaaaaaaaaaaaaaaaaaacagacttctttgcttaaagttgatgagattgaaaccaaaaaaaattcaggagttactaaaggttatatggtgaaaaatctccctctcagccagccccctggttcccctccctggagacgaccaatgttccctgcctctcacatatcctttgcaagagattctagatgtatacacataaataaaacattatttgtttatatttatatatgtgtgcttacctataaatttacacacatacatacatatatatgttttttaatgcaattgtcagcatcttgttttttttgcatgacaatgtatcttggaaattggtccatatcagacctggagcgcttcttcatttgtttttatggctgtttggtattccattatgtggacagactgtaatttatttaacgagtctccctctgatggatatttagatttccaatcttccgctattttcaaacaatgccatgagaaatcatcttgccaaggtgcgtcccacatttgagagcatgtttgtgggatgcaggatgtagcttacagggagctcctggcatgccgatgtgagaaccgaccctccatagcaaggctgccccacatggcgtgggctggcctggcctctgagcttcctaagggctaaacctatagttacaagaattttcctaagcccctcagccacagatatataatgtgtagtttctgaatgagtgaatgaaaatacttacacttcagagaaattgtccttagcagaaggcataggacatagttttatttgttagacttacagaccatctgcctgtgaattcaaataatagttttcttgttgtttttgaaatgaatacattccatgagagctgcttactcagaccttcagtggcccagctggaagtctggttggggaatcattccctgggttgtacaagttggtgcaccagattaaagataaagtcatttatgatgacactaaaataatatgagcatcacatttggtagagactttgtttttgacgtaacccaagataagaccttatctgctgtgtgtacgggaaggtgcccttcaataaaggcctcattttccttttaatattccagaatgcagtgggagtgaatgaatgctggcagccagcctttacggagctacctccccaccaagatgctcccatttagtcctcccaaccctgttgttactgccactttgcagacacctttggctcaggcggtgaagtcactttcccaagatcccataggcaggatccataccaggcttccagccccgaggtagtgctgttcagagctgagcccatcactgtggctacccaggcacacttagaacttagacgtcaggacaagatctgtctatacttacagctgtacccagtctgtgttttggagttcacaaaaataacctcaaatgagattacaagggtaactgaggtgccgtttaaggacattatgtcccctgtttcttccatgaaaatattttgaaaaggaaagcaaataccccgctttggttaaggtctgtgtagtggattgcagggcagctgggactctgcaggttccacgggcgtcagaggggctctggatcagggaggagtgtggtttatttttgttgttgttgttttgagacagagtctccctctgtctcccaggctggagtgcaatggcacgatctcgactcactgcagcctctgcctcccgggttgaagtgattatcctgtctcagtctcccaagtagctgggattacaggtacatgccaccacgcttggctaatttttgtatttttagtagagacagggtttcaccatgttggctaggctggtctcgaactcctgacctcaagtgatccgcccacctcagcctcccaaagtgctgggattacaggcgtgagacaccgtgcctgtccaggagtgtggttttgctggagcctgcagtgtggtccccggcaggacccatctctcactgggcctgtttcccaccttttacatcagggcaagggtcctatctgatgtcaccaaagaaccctgagtagctcctagcagagggtgcttgacattttccctagttcgaaattagcagtcagcacacgtgtctgttaagggccagagagtaaagatttcagtctttccaggccatacgtatggtctctgtcacaactactctcctctgccactggagctcaaaagcagcatagatggtatgtgcatgatcgagcagggctgtgtcccagtgaaatgagcagtggacagatttggcctcaggctgtagtttgctaatccttactttgattgcctaatggcattagatggaatctgcataaaattagtacatccagccctacttgggtacaagctccatttcttgtgtctttatagtgggtgcaggtggggcttggagggtctccgtcccttcctgtcactttgctggctgggaaatcagaagaccaactgctaactgactagcctggagcagcctttgttgctctgaacctcactttccccatctgtaaaatgggaaggttggactatggtttctcaaagattctttccagctccaaaatgttctgaattctagttagaaaggaaattaacgttttcttccctggaggttgtggtttcagtttgtgtctttggtcaccaagacaaagtggatagggtaatttggtgttgtgatctgcaccccaaagggcacttactttctggggcaccccatcctagcagagacccctcagtctcaggagccagttgggtagggataatccttattgctttcttggcccacatagtgtcctgaaaataaggcttcacctgtgagttgctgcatgattccaggtgatgaacgttaacctctctagcctcctgttctccacctggaattgccccctgtgtagactgggtgggaggagcaggtgaggaaaaaaaggagaaagaagctgggcacggtggctcatatctataatcccagcactttcggaggctgaggtgggtggatcacttgaggtcaggagttcgagaccagtctggccagcatggtaaaacctcgtctctactaaaaatacaaaaaataggcagccatggtggtgcacgcctgtaatcccagctgttcgggaggctgaggcatgagaatcacttgaacccgggaggtggaggttgcagtgagccgagattgtgccactgcactccagcctgggtgacagagtaagactctgtctcaaaaatataaactaaaaatgaaggagaaagagatgctttggaaatgcaaacagcgctagggcttcattaagacgatgacatgtcttgtggttgttccaagggaagacatgctatacagggaggaaacatccccacttggcttcaaggaactagatcagtcctggttcagccaaggcccaggcacgcccacgtgggcctggactttctgccgtgctcacatgctgcagctgccagttggctggggctggctgcctccagtctccttctcagacactccgcccagttttgggtggcctggggactggagaggtgctccctgggagacctggaaagcaaacggcacagcagtcgggagccccggtcagcttcttgtgctgacttggctcattctaccactaatgaactcgggacactgcctggactctttcctgattggaatcatgggatggggtggtacccgcatggatacctctgtttctgtggcaaatcatccacttagtaaatattcattacttattaggttccaggtattgtgcctggaatacgtggtagtattatgtagatattgttgctgaggttttcctaattgccaggcatcagactaaatattacacaggttagcccatttgatcctcacaacaaccctttccaatttacagatgggaaaactgaggctaagtggaattatctaagtcagtcagctggttagaggcagagccaggatctgggtctgtaactggacatcactgggggctctgcctttccccaggtcagctgggagatgtcactaggggggtccgaagcacgactagacctactcgtgtgttgtcatttgtggagtgggcctggtttagatctcccccgtcagtcattctggtttcttgccgtggagtggcctcccttccaccttcttcaaagccacccaattggggtcattttcctagcttgctggatggagctaattacagcatgctcctggtccctggcccttccatgtgcatctgtctggtgagagataggtggagttctgggctctctgtttctggctgctcagcaaaaatcactcagaagaggttttgtgaaagcctttgtgggcctcagccataactggctgggcctgggaggtgcccaggtatctgcatcgttagagcaagctctctaagggggctcttcacagctgctgggtctccgggcagttggtaatttggtgtgggctgagtgcacaggtggtggtactgtacctgttctgcaggggtcctgaggggctggcacctctccgggctgttttccaacagcccctggtcgtgccgaagcacctgtcctgcctttctgttccaggccactcaggtgtaccaggtcaagaggcagccgtgtttggttcccctcaatgagtctggctctggcaaaaccatggctcaggcatggagctgggcagtcccaagcttggtcctcagccctttcccttcaaagccagttgggtgagttccttgacctccctgagattctcttttttcacctataaaacccatgtttctagctgcatctcagagttgctgtgcagatggaagcgtccttgtgttcagaggagtgacagtgaccgtgtcttcagcccaggccttgcacagcgcgggcaccgcagctgtttgtttgcagctcctgggagcaagcatgggttttagctgtgtctttccagctcctaataaagtcttggcctgtggcaagagctcagctactctggtttagtctccaggtttgggggttgtgatggttagaccgtcatggctttccttgcttctcgggggctctgcgtctgaaacaagaggtgcgaggagggcaaccaatcatccgggtttgcctgggacttagggaattcctggaatagtcctaggaaaacctgaggctctggcaaggaagaacagtgctgactgctccatcaggctcagcaggcactgtgctgagggctcgtcatcctgggatgggcccaaaacgttttaattttttaataatcggaagaaaataaatgaatataatccagcccagaagcctggattatattcgtctttaaaccaacacattagtaaaatataatttttaatgtgtcttatggaggaggaggtccacacaggtaaaagcgtttcgaggtatgagagggaccatgcagttctgggagagaccactgcacccagggaccccctgccttccacgtctcttgaagatcaggaggaagagaagacagccaaagagaactcctgcgaggctcctcctgagtttccagcgatggaaggaagcggagcaatggctgtttctgggcctgccaccgcctagaacttggattggggggttggtgaacttggattgggggatggattgggggattggattggagcaggctgaatgtcagccctggaaactgccactggcctcccagagtgagctgggagatcctggtgttcagatgttcctgccttggctgcgtggggggcaggggcgggggggcggtggttcctatttggagccagggagttgatttaatacagctgaggccaagacccagcgtggagcctacgactgcagctggatccctgccagccctctttcccagccgcatgtggctccaaatcccagaaagggagaaacccgctgtggggagggggtgcagcagatgtcactgtccccacatggtacttcttgtttatcttttattaaaggcaggcgcttaggcaggggcagtgctcagagcagcccttgtgagcgggccatggtggcggcctccctcagaagctgtgggaagagggagaaggcatgaataatgcaggctgcatcttgacggagcttgtccggcccccgcagaccgcgcagcgcgcacctgagcaagcactttgaatgcctctggcttctgaacttgagaaggaagctcccgggatgggcctgactccgccgcctggttgcaatagtcctggaaggggcggcggagcaagcagaagcctcctgccctggcccgtgggtttgcaccagctagaacgtggggctcctccattaagagctccttggcgttgggagctacgcagcctcacccctcatcttatcacaccaggagaccggcgagcagagtggggatggccacacagggagttcgcagcagggtggtgctctgcctaccgactcgcccctggggttgtccctgtcgcctcagcctttctctttattttgggtggaggcagggtactcaggacagggatgaaaacttaggtctgtttttcattgttcatcctattcttggcaacttttgcagaaggcgctggcaggaaggagaccctggggagggaagagttggaggagaaagaagtctccttggcacctttgcctttcctgctaaaaatggtggcagttctgcatttctactaaaaatagctagtcctctgtcaagaaggccacccacactggggtgtggggactggggacagcaagatgtgggccctgggccacacattctgtggagaggcctagaagctcacagatagtcacttttcttaggaagaaggaaggagtggcaggaaggggctgggatgccatctctggagagcggagcggcactcctgcccctgtgtgacaaggacaggtctgcacactctgtcatgtattactctaagtggctttaatattaaatggatgatgaaggcaaggataaacaaactgtagcttaccatataatggaatagtattcaaccatcaaaaggaaggagattctgacacatgctgcaacatggatgaaccccaaggatatgcgctaagtgaaacaagccagacactagaggacacgtcctcatgattctacttatatgaggcccctagggtagtcaaattcagagagacagaaagtagaatcgcagctgtcagcggctggggaagaggggaatgaggagttaatgtttaatgtgcacagagtttcagtttgggaagatggaaaagttttgaagattcacaacaatgtgaatgtatttgatgccactgaactgtacacttaaaaatggttaaaatggtaagtcttatgttatatatattttaccatcattttaaaaaaattaaatgggtgtcgttgattcctctcttcctctcaacctcccatatagaatgactagaatccaggtgtttatcttttatgccaatagtgatgatgatgatgatgatcatgatgatgatgatgatggcggcaattgtgttcttttgtagagaaagtaaggtaactctctggggtaaccagggcagaccctgtgagtattggatcctagtgccaagcttggagcactctggcatttgggggtctccctatggaattgctaaagctaccattggacaagccccactcatctatgcagaacttctaaccaagtttccagtccctcttctttaaatgtgagtggacacccagggtttaagtgacatctgaagaaaggctgctatgtgaaagagcaacgtccacatggacgactgggaaagcatggttcccaaagcagcggaattcaggaggagatgaaaatgtaaacagaaaattgacctcccacccattggtatcctcagaaaggcccaagaaagcattgcatccataaaacaagaacaggatgctatgaaataagaatatttggagaacaaaaaagagctttagattaaaaatatgatagttgaaataaaaagttcattaaagggatacatgacatttcatgaaaagaagaagaaagcaaagactggaacatctgaaaggaaagctgagaaagatgcaatacaaaggcaggtgatggagtatttgactaatggaagtttcagaaactgaaacagaaaacagacgggagaaggttatacaagaacaatacaagaaaattgcctggatcaggacaaaaatcttcacattaaaacatccctcagtgtgcccagcactttaaaagaaaaaaaataatttagacatgtgattgtaaaatttcaaataaccaagaataaagtaacgcttctgaaaacttctagagaaggggagaacagaacagaacagaacagaacaaaacaaaactaaacagcctaggtcatctacaaacgaaggaggactaaactactacccttccgatcaacagcagtgagtgtgtcaagtcagtgaatttgccctgggaaattagcaatgaaactatcagacaagctctcaggcagatgggaggggacaataaggctatcttcagtcatataggagggactcaaagcatttaccttctgtatatctttggcctttacttaaggattctctcttacagcgtaagggagtaagtgaatgcagggaagacctgaggtcccaggagggagacccccaagaagggaatgatagcaaggccggggctgtgcagctgccccctctctacagtcagagcagaggcttgagggattccaggggagggactccagaagagggctgcagccctggtgcctttggaggatcgggagctgctgtcatcactgtgcgagaggcaggggttggccttatacaccattctgtgtgtggtgggggaggtccaagtgaattgagttgtcctctgtataaataaccaataaatcagaaacattaagctcataggattaaagaatcaaaacgtggtattttaataccttccttatatagatcagatagctgccagaggaattaagagcaggaacattttttcaaagttaaaagtggttgcctccagggcacagggaggggactattgcctttcattataagccctttggtgctatttgttctttaaaaaatcatacgcagatcttttctcagccttttggctaagatcaagtgtaaaaatcatatgcaggattgcttagatttttttaaaaaaagaaaaagaatcatgaaaattaaaatgaaagaacttgcatgggccccagtttgtaacaagaactcattgggggtggactcagggcagcatggaacaggcctctcagtggtgttcctgggaccatgggctgggccaccttaagggaggtcatgatggctaggctgggctgggactggagtgacctctcaagtgaggagttttcagttctatgttgctctgtttggatttacttttttggaaatacacaaaaatgcagcccgtgggcccccagggccaggggactggaggtggcccctgctcttgttgcctgcaggttgtggttgggcttgtctgacatgcagcatgaccaggaaggctttgtcaaggctgctgtgtgcctggggtcattagatcctgggatgactgcctgtgacttaggcctggtccctgcccttggggcctggctggtactgaactggagtctggtgtagctccaggcagactgaaaggccccaccagggaggtcttcacactgtccccgaacacagaggaggcagtgagtgccagccgggcatcaggcagtgggcttgggctaaaccagtgcagtccccacctccctggcactcctgttcctgtgaggaagaatagacaatcaacaagtcaacacacaggtgaaacactttgagggagaggtgctatgaagaaaatagagtgggcatgagagggtaactgggagatgccccccactgggtactggggaaggcctttcccaggaggtcccatttgagaactgaaagcttagatagcgtgagccttaggaagcaggtttgcagagaatacaagcagtgccatctggtaggaggggcagcattgccacgtcttggagaaatacaccagtcaattgaggagtgagctgagactggaaaggcaggccagaggtgggacaaggagcctgactccacactaagggcgagaagtcccaggcccagagtgagtggggaaggccctaagggagttgtaggattagaacccagatggcattcgcctgtgtggagggtgaacctgagcttggagtctttcaggagttggagagaggaggaggacaggttggagcacatggagtcatccctaccctgcccaggcctatggatcgcacagagacggatgggcagagagtcgttccccatgcagcggggctcctcctgagctccattttcgggccagctctgtgctgggcttgggtggggccactgcaggccaaaggaggtgctgaaacacatagcactcctgcctacccccaccaggggtgccagggggacagctggctttccgacaggacccccagatgatatgtcgtgtccgtgccaatgaagtcgaggcaggactgagggacgagtgtgtttctgagggatggcatccaggaccagtgccagcattccagaggcagggccgcctgtaaacacagacaggggaggtagctgtttatgtggttggtttgaggaaggcttctctgcccacagatacctctcctgcctccccagcccactttgggatcaagcctagaattccaccattataggttcattcctttggcttgcaatacaaacatcccagtgaggaggtgatccctgagctgtcactggtactgagcaccccgtatgccttggtaggtcatcaggacctttgccattcaacaggacagccagccagcactcgctgtgcccagtgtgtggccactgtgatggttctgggtgtgtgaagagggtcaggtgctgtccacccactctgggggagacagacgcaggaagggataatgagtaatgaattctgtgagagagtggccaggaacagaggagcacagagaagacagcaatgtgcatccttgggcaaatcgaaaatcccaaatcccctaccctctctggccctcgacatgatcgctcaggagacagtagacgacactgtctctgcaaggcgagtgaaggccagcaaggtgctggccctcagagggtctttggcaaaggctttctgcgggggctggaggggggtaggtctaggttcagctgaggctgaaaggagggccaggagaccttcaaagggacagagaaggtgcaggcagaccaggacgaggaggttggcacaaaggtgtgaggcatggggctgccaagagcagtttgatccaggacagaagctggagatttgagttcagagaatgacacctcaggtcactagggactgggcctggggagagaggaggtgtcgtggaagagaaattctgtgacatggttccaccattggttctggggagaagattctcctgcagctcagaggggtctcccttgagaaaggccctgggcctgtctagcaggagcagcaggcctgccagtctgcaagggctggcatgggattgcaatgctgagctttctggctgtttggatctgttgtttttctaagtcactagtcccttgcatattaagagaaagaagagagtgaaacccaaaagatgacataatcatactttccttcattttccaatgaaggtctcccttttgcttttccaaattgttgctatcaggagaaagacgcacatggtttctgtatgacatgtgttgagcctctctcctcgcaggccccaggggtcaggtccccaccttgggacttgctttgattctcacctcctggcatctgtgtggggtgctgtctgaatggcatggttacaggtgcagctggctagggtgggtctaggggactgcatttgcacggtggtggtagtggggatgtgggtcccctatgagatggagcagcttgggggtaacagccaagatgtacaggcacttcctgtccatggtggcctgtggctcccccgagcccatttttgtctcctccttcattctaccagcatttatcaaacacctattgtgtatcggggctatagtgggaaataagacagattcctgccctcaaactgctcacattctggtggaaaaaaaccagccaagagtgtaggagttacagtgtagagaggtaagagcacaaaagggcagcccaagggcagggccgggagtcaaggagagcttcctggaggaggtgactcctgagctgagtctcagaagaggagcagaagtttgggtcaaaaatttctaggcaaagagtacagcaagtgtgaaggcagtgaccctggcaggccctgtcagttcacctccatcctctggtcacacttgggtcccacttttaagagggtctgcctgccagttccagccgcgcatagccttccctttcctgaggccgacaggatgtgtcatatcacctgcccagtgctgcttcaaggggggctgccccagtcatctgctgagtgtgtgagcagtcccctcccctgcaggctgtgacaatcaggggaaatcaggatcccagaagaacctttggaaccctgaggggctacagctgcagaaggggtcgtgtttcatgtcacccattatatttggtctccacgatgtgtatgttctgaggttttctgctttcaatgcctgggacacgcctgaagatgaggagaaaccagaaggaaggcatgtgcaccagaatggacttcttgagtgctcgctgtttgcctagcatggggttcttaaattatcaggtgcatcagaatcacccaagagacttgttaaacatgagattctgggctccatcctgagtttctgactcagtaggcctgcgatggggcttgaaagtttgcatttgtaagtccccagatgctgctgctgctgctgttggcccagaacacacttggaaagcctctggttcagcccagggctgggcactctggcctgtccagggccagcatggggcaggaccccttcgtgggctggcaggagccctgcacaccctccacacagagcaggctcccctcgaggtcatcgcggaatgaccctgatttcctcatctaatttgagaggaggtttatttgggcaggaataataaaaagcacagcaaatgagcagaggaaaacagaacccaccagacatgcaaactcacagaaataaacaatttgccgatgatcagggaagaggctacaggaaggagtttgtgcagacagctcctatgagaaaatggtccctgggaggtcccagagggctttccggctgcacgctgaccctggaggcagctgtcagctgtggcaccatggttgttctcgtgcttggagctgtcttcaaagccagtgagcgagccactcaagaaacttggttggtcaggtggcttcacagatgtactctgctttttacccaaacagtctgcacagtgcattgtccatcagcatgtgtacccagggagcactgtgaattcagggccctgtgtctccagtactcagcatggttacagaatgggtgaaggtgcagtgaagtgacaccctcttcccatcactaaggatattcacaaggtttaaaaacagttcccaaagcaggattcccaaagacgctctccagagaaaccgtggagccccccaggggaattgagatgatgaaactactgcgagctcacttttcttagggttccaggcactgcttggttttccatgcactggattatttaatcctccaacagccctggtaacagtcccataatcctcactggacagtgggggaaatggagaccacagaggtgatgtgatgggcctgaggtcccacagctggtaaggggtggagcagccttccagccctggctctctgaccctgggcctctgctctgagcctctgtgctgggcctcctctccactcaggaaggcacacatatgttctattaggttcattaaggaaaatcagttaccctatttaaaacaccagcaggcaccatttgtgcagcgcctacttggatctggggacctggattatctcgtgccatcttgataaaagcaaggtcactgtgcttgtccccagtttacaaaggggtcatttgaggctcagggagggaggtgacttgagcagggctgtacaactggaactgatccctgggctgctgactcctcagcctgagttctccctgctgtccatcccgcacttattttccaacacctcaggctgagaagctgcctgttctgcctgcctggcttctctcatgatgccagccaggagggagtgagggcagggggtgcccacctctagcagctcaggcaggttctaatgtgggcattggcagcgccttctgggatcagagctgctgtgccactcaccttgccaccctttgttgcaccttctagctccttcctgtggggctccaggttgggaatcaggcctcccatttatggcaggtttgggccgactgtgcccgggccaggaagcaggacggctcctaggtagagatttggatggggttctcaccatcatgggcctcgttttaaagtggacctgcccaccgccccgatctccactgcctgtagactttgcagtgtccggacctggctttgacctgggaccagccactgtgtaagggagctggctcagctgcctacagaacactctcatggcaccggaacctccagggccccctaatctccagggactgcagtcccgagccctctgtcattctacttgcctgaccactgccctcccatggctctgcagaccagcgctttcctgggctgctctgttggctgtcccactgcattcctcaggggcgtctgaagaagcctcgtgtggctggaatggggataaaatccagacggaaaggcctctgatgaggacttgggcctttggtgtgcctggctcacttcaggcctggagggagtagccctctctgggttgaactgggcccagaggccctctgatttatatcaaggtgggagctgcctgggcaggcagaaataataaaggtgtgggccggggcttatggaagatggggtggagggaaagctgggcagaaaagctcatccttccatgccttttggccatgctagcctaaagaccaggggaaggcttagagcttagtgatgcacccaagacgtgcagggctgtggatcttaacctctgaagccactgcccactctgtgggcagctgcacatcacaaagatctaaactgaaatggctatggaggaaagaggagtgaggtggggaggagggtagtgacagagagatgacaggaggaaatatcctgactagagagcttccatccattcaaccacccacctacccatctgcccatccacttacccatttgcccacccacctacccatctgcccacccacctacctatctgcccactcacctacctacccatctgcccacccacccacccacctacccatctgcccacccacccacccacctacctacccatctgctcacccacccacctacctacccatcttcccacccagccacccacctacccatctgcccgcccacccaccgacccacccacctacctacccatctgcccacccactcacccacctatccatccatccacccacccattaactgatccacctcacccaaacacccacctactcatcaacccatccatcctacccaaacacctatccattcatccacccaccaggccaccccgctatccaatgcatttttcatcaatcacctgctatattccagcattttcatccaggtcccacctcagtgtagcccacaggggatcaacccccccacccccacccccaccaccagtttctgatctctttttgcacgcacagcctgatggtggccctgggcccttgtaaaccctccttcccattttctgatactctgcttgtttctcctcgtggcccactgagatagtaagctccttcactcagagttgcggttgcttctaattccctcgcacctttcttagagctctccttggaggagttgctcagagcatcttttgtgggtcgatggaaaggttactgggaaacttcagttgtttgagactgggatcacctggcctctgtgtagggtggtcgaggtgagaagggagctcacgttaggtgaacacctgctgagtgctcagggggcgggggagaatgacagcttggtgctggggaaagaacccatgtttggagctggcaggggtgggattggttcccggagttgatgccagctgtgtggctttcaacaagtcacttaagctttccgagtctcagtgtttttatttgtcaagaaacaaaatataaacaaacctgaacaattaaatgcacatgtaagtactccttgtggtacttggcatgtggctagtgggtgatggtctctccccatgcccccgccatgtccatagatttgaagactgatcaaggctactttgttgagttaaaatgggcatagatgaagcttggctctgggtcagggccaagctagtgaacaacaatgggcagcctctgatgtttctggcctctcgcctccacccttgtcctgtctcatcctcttggccaccggcctgctagtcccctgggcaggatgggggaagagacaagctgctgagttgctggagggcaggatggcttggattcagcctgctgccttgctgtggaccctgtggctcaggccctctgtgcagcccagtggccggaggctggttatccataagcaggaaatggtggaggtgagctgagcatgagatgatgtcaggagatgtggggcaggaggctgggctctggggagggcctgcagtgctggggggcacaggcatttaatcaactgaattcccactgtcctctctccaactccatttattacctattaaataattatctcatttggaaagtgtttcttaatgtagggcagactctatccccagggccatgggttttgcaacgagttgtctcctgtgtgcgtgttccaggcttgggcaggaccggagcgttcttgccctggctgtgcctctgcctgaaccaggctttccggaggcacggtaaagcgggtgccccctcccctcgacctggctaatagcctcattacaagggttttcttaagcagtattctgtcttctaaaggggactgcctagggctgggcttctgaagttacttgctattttctgggactctgccttaggatctccaaaacgtctgaaaatgtcagggatgggagaggcctttgtcgtttttacaggtgaggccactcaggccctgagatcacacattgagttgatggcaaaagcagaagcctaggcctcccgcctgcaaatgcagagcttgctctgcttcatctccttttgtcttggaatgtcattggagcttaagggtggccccttcccctcttgaaggaagggctgtttcctgaaacaagagcagggaagctgtgttgagtgaatgcagctctgcctcacaacagccctacagatactccctcctttttttttttttttttttttttgacagagtctcgctctgtcaccaggctggagtacagtggtgcaatcttggctcactgcaacctctgcctcccgggttcaagtgattctcctgcttcagcctccggagtagctgggactacaggagcacaccaccgtacccagctaatttttgtatttttagtagagatggggtttcaccatgttggccacaatggtctccatctctcggcctcaggtgatccgcccgccttggcctcctaaagtttggggattacaggcgtgagccatcgggcccggccttttttttttttttcttttgagatggagttttgctcttgtcacccaggctggagcgcaatggcacaatctcagctcactgcaacctccgcctcctggcctcttggccaggctggtctggagctcctgacctcagacgatctgcccacctcagcctcccaaagtgctgcgatgacaggcgtgagccaccatgcccggccaatactcccttttttgttattaataagttatacagactttctagaacatgtgcaaacagtactgaagcacgtgtagaaacacaagccttgcccctctgtctgctccccagaggtcatggtggtggtcaggcaggtgcacgccctcctcctggctgtggtgtgagggtggattgaaggggaccaaggagagtgcatcggagtgcatcattaaggtcctctaggcaagaagcagaggtaatggaccagggtgggcttcagatttgtcttccagtttcaggtgtttagagtaaggtcaagcggtcagtaccacagcgtgccctgaggatggcttcggtcagttccagtacccccaaggagctgcatgaaggtctcacctcatcctatcacctaccctgggcttcttcatctgcagggtggggctcactgtcctcaggtcctgagattctctcaggcccccaacacaggccctggggctgcccatgatcaggccagctgtcagtgtccattgcagaagctcagagggccccctgggacttggctccctttcgagattctgggagcagactacagcagcggtcactgaccctggagtggtcacgggccactttgaggagttggatagcttgaaggatgaatggctgagctgcagggagagatctggggagggcatttcaggcaacggttctggtgggtcaaaagatgcaggagggacctgggtgtagcctgtttgcctgcaagaaggccctgtgtggaagaggcagggttccttatggatcctgggcctggcccattgttaacagggagccgtctgggactctagagcagtgagggggcagcccaggtacaagacacatggtgatgaggaaggagctagggtcagaccctggctcggccacttggtttcctgaggccctgcgtggattaccccatttctaatatggccagggttaatgtacctggcccaaggattgttgtgaaaattagagatccgttatggccagcacacaggagtgtgcaatggtgatgcaaatgatataaatgatgatgaatgaggcagaagctggaccactctgcctttaaaatcctgaagccctagatgcccaccctaatcatgagagctgtcatttattatgcaatgactgggtgatgattagagcccatttaccctctgcaagagagtctctatcacccattttacaggtgaggaacccgagtttcctgatgtctctgaggccatgtagcccatgagtgacggagtgcgaattccattctgtgctgtctgttcagtgtggttcatattctaccagactccagccctgcctgtgaaaccccatatgtagtgggtgctgacgtgaatatgaaatagcaggtgtgccccatgagagaagctcagcaggcccctgcaggcttcctggaggcacctcctgtagtatggcccttggatgggcctgctgcccctgtgattcagctccaggtggagcctgggaggggtcccagtcctgggcctgtggctggagtcgcccacgctatagtcatccagtctcctgtcaagatcttttgctcactcaacttgctttttaaaacaaaaaagcatccaagtggttcagtctccaagcctgggctgctcttgggccctcttgagaatttggacaccagggtttgctgattgccacagcagggattaaccctccacggcccgtggcattctcccagctcgctgaccctgggggaaccggggcctgctgagctgagccctttgttaatacagacgaaaaaggcattaacctgccggtcctgaggctgtccaccgcagaaatgtgacttccctgcctgcacgttaagtgctaatatgctcactagctggcctgtccaccccacagactcattaccgcctgaccacagtggaattgcagagccaggcaggggttgtgtctgcaggctctggcagctcggcagatttcaatgagatgatcgcttgtcatttcttattaatgagcgagtgcctgattcattatacatctgaggggtgaaccaccccagatggggaggaggaacacggagatgtgcaggcaccacagaaggggtgacgtggcccgtgtgtgagtcttttcttcctctttcttcctgcaagaaacaactaagaaaagctttcccgctttggcaggcaaggcttgggtgacaggctatgtaatggtgaaggggaggcagccccatggcaaagggaaattatcgcatagagggcagatgtctatgcaggagggcttccaaggagacctggaatgaatgtggggtgagccctggcccaaaggcatttgctaaatgtttgtggaataaacaaatgcctacacaggaaatgcctcctaacataaggatgcagttcgcccacccctccgccaggctcctgctgtgtgccaggcattgcacgaggtactggggacacagcaggccttgccgtctgggggctccagggactcctgggttatgtctgccctgccactaaggtatccgtgtgacttcaggcatccctgtttccttatctgtaaaacatgctgagctgtgcgtgaccccgtctctctgtcttctgtggggtggattggcaagagctgtgggagccggagcccttgtgggtccatcgtgagcactttgtgtgtaggtgggccggtgagggtgctgagctgggcaggtggggggccaagcctgggccttctcagatctttgaggaaatgcacaatatcttattcattatcgcttcactggtgcctgtgcagggcaggcactccgaggttctgggtgagcgagtgtggggttagcaatacagccaaagtggaaggctggccccggctcagagcggggctcctcccgcctaagaggacagcctgctcagacctccagctaatagggctggtggcaaattgtactttgtgttcattggtagcatgagattgtagctcgtatctctttccctccctggctccccagtcggagggagcttccagaggcagtggagcagctggggatcagctctgccccttgccagctgcaaaaactcaagtcttgggttttcatccatgttaacaacatctgcttcataggcctgcaaggtgaccagagcgcctggaaggggctattgctgtggttgagccattggaggacttggcttagacaactcacaacttggacttagtcaagaccaatgagaggacaacatgcctactgatggattaacaggagtttctgggagaccctggaagcatgaagcccacaagttccctaaagaggagcaattgcaggcatttctccggcagccgaccactgcccctcaggacccttgcatgccttggctccggccagtgcccgtgttgcccctggtcaagggctgcctgacccagtcagtgcttgcctcttcctgaccgcggtctccaccccacacctgtgattgcacaaccccagggctgtagaatccaccacgggccgtctctcctgctatgatgagagcctgccttgcttcaagcactaggactccacgtgaagaacacacagttctttattctgttttaatcagatgcttaatgattttcagtctacttaattactagtattgtattttttaaatagaggttttaactgcatctatgtagtatcttagccacaatgtggattatctgggcatttgtgggctaacatggaaagctactcatattatgttacattattttttatgggaaaatgcatttaagttccaaatcattgatttataatatgtcgacctttgagaacacagctcatttgtaagtgggaatagcctgtattcagaacaacataaagggtctgatatgtcctgggaacagcacagataagctgagtcacaggagggcgaggccgaggcagcccttccaggaagccttttgcttggaggaggagttgatggggctgaggcgtcaatgtgaacaggagagagggtggcgtctgctgtgtctgctgtgtctgcgggcatattagggtcaatggaaaggccagtttggcagcaaaatgacttgtgtgtggagggcggctggagaagtagacaaattcccaagggcagtcactggacttagaggttacctactgggctttggtggagccagggaaagttctgggtgtggagagtcctggtggcagcctgcaggaggaggctctgtgagggcccgtgtggggacactggtaggatgccatggtcttcctgcagggctggcacacacagacgggagggctgcttccaggaaaggtagttctgggagacactgtcccctgggacaagagcacacaggctggtcttgactgtagttttgttgcctggctgtgtccgtttcccacctgctgttttttacatgggttgctcagggccaaggcagctccagctgatcccatctccaacctctgcccctgcaagtcctgctctgtgcagagcccatgtgtctcgatggctgaaggtaggggtcgaatggggattggagtgggcttgccagaggcactcccaccctctcttttttttttgagacggagtctcgctctgtctgtcgcccaggctggagtgcagtggcacgatctcggctcactgcaagctccgcctcccaggttcacaccattctcctgcctcagcctcccaagtagctgaaactacaggtgcccaccaccacacccagctaatttttttgtatttttagccaggatggtctcgatctcttgacctcgtaatccacccacgttggcctcccaaagtgctgggattacgggcgtgagtcaccgcgcccggccccatcctctcttacctgagcagggctttggctctctgtgggtcacttgtatgtcatggaagggcatttcttcaaacccctcctcctctaagcctggctgaagagaaccagctcagaatcatcactgcctatggaaggcctggcccaggctgcagacaccttgggaaggggtctctctggagatggccgtggggtccagagagcagccctttctgtggggcattcactgttggggtccaaccagttctcttccaactcggtagtgcctcattctgagcctgaacattgccccagggaagctgaggggaagggctggtgatggtgccctgggattctgcctgaggcctcatcacttccatctatgggtagtatccggggctggggagcccgagccaggagggctgactaaacgtggctcgagtgtctgagcgcttgcctgtgtcagtggagcccttcgcggttccagagcagccactgcatggaggggagcctcatcgatgagctcactgcatgcaaacagtagctgggccaggtcctgctgtctgcatagatgccctgccccccatgtaacacagttgccacccgactactgtcagaaggatcaggattctgaacttaaggagttctgtcctcgccactaggagggacggggtccttctggcaagggtcccatcaggaaagagttggaggctccattccaccagcctccagcatggtctagttctcccccgaggctgaggaaaagtttggttcccttcccttgttttctttctgtggcctttgcggtgcccttggaggcagtaccacccaagaaggggttctgcttttcagttttgctgacccgggagcgttggggttgagctttttgtgtaagtgaccgggacaaacctctgatccctttgcaaccccatggccctatagaagtgtcgctgaagcagcgtctggtttgaccatcttctccccatccctgccatcccaggaagccacctgactcatctcaagggctgctgtatgccgtggggagggtatatgcggtgctcagatagtgccagccaacgcctgctcatgcagcccctctgcattcaaggctttgccatgcgtcccactccgggtaccccaggcaggccaggctctctctctggacctggcaccccccctgttcaagagagggaagagcaggccatttccagcccaacaccctgtgcctggggccagcactgcccagactcagagtggggatgcagttggtgtttatgggactcactcttgctccccatgctgaaagatgtccacagttccttcaagattcgaggaaggcccatgcaggcctgagctgatttcttggcttaagatggggtcccatagccccccgcctcctgcataagaaacatgtcttactctagaggcctcagcctgtgcttctgcaggaatgtagcagagggtgttggggatagggtagggctggagcttggccacagtcagagggtctcgggtagggacgtggagtctgagcctgtgacgaggagagctacgggacaggtcagggcaagggcagcgggtggccgactctggagtgcccccctcctggtcagggcccttcctcccatcctgtcctgggattaatgtcaaatgtcttgtgcttaatggtttaatgtcaaatgtcttgtacttaatggtaatcccattgcttaaggtaagatctcccttttggggacagaagagctgtttttcatattcttgatgccttgagatcagatgcaaaagaaggtatagaatgccattggggtgacaaagagtgatgacgacaatagcaatgacccctccccaccccattatgtctcctgccatcccccacccccattagcagaaaatgcagcatccttgcacatggcacctggcagacagggcgggtggtgagtggctgagtggaatcagcagtccgggcagccctcaccagcgggtccgtgagctttggaggtgctgaggttccagtcttctgtttgattggaactccgtgtcccaaagtacttttcacgtgcccactccctgcggaagggaaaagagggtgggtgtgattttccacagcttgattcgaaagactgaaactcgatgagtgacatttcaggctggctggggatgtgggttcagatccccccatgacccctgtgtgtgaggagccaccttcacctgcactgcccgcagggactccacttccaggctctgcagctctcagtgccctcagggaactgcagggagccggctcagaaggtgcacagtggcctgggggccagtcatgtctttcacagccttgtgcgccttggacaagtctccctcccttcccgggcctcaatttccccttcttacccagtgggctgcctagtccacatggcccctaagatcccacccagcttcctcttcctcttggggccacagagtcaggagttggaggcagcatgacccccaagttccagaccctggagggcagccgctgcccctggaaggcatgccgacgtcagcttctcccgggaggcggaattcatgcgggccctagtctgagaaaggcacccgcagggtggacagcatgctgcccgccagcagtgtggctggatccccgagtccagccagcctttccgttagccagccagccagcgagcgctcctaaaccctggccgccgccggttataaatgattcatgcagccccgcctccctcggcggccacttgatgttccctgcgctccagcccggcggtccaccgcctctcctgccgctgggcagtgccgccgctgggcagtgccctccccgcaccgccgcccctctgggtgctgcgtccctccgccctccccgcacgctgggtaagttgaaggaggacggcagcttttccggagacgctccctggaaaggagtgctgatgaggccgctcttgtgtgtgaaggcctggcctgcagcgcccttctcccacgtcccttccccttgtctgctgcgctccaagtttgaagccagcaagcataagtaggcgccaaggcagggaggctgtgctgggcctcaggcggggggagctggagggaaggagggagggaggatgggggaggaaaggaaggaactgggtggacacagctggaggggaggagagagagggaatgtggggaggcatggaggcactgccgagaaaatggagcaagaaagtgaggcggctcctgcgtggacccaggcgagcgtgccagggactgggggctctggaagattcacactgtcagccgtaggcgttctttcctgcccccccagcctcccgcaacggatgtactccgagcccttcgaactctcggggtaccagtgagaactctgaactgagagtttcttctgagatccggcaaagccgagcttctgagagctcagtcttcgccacttcaattccccgcggtttgagctgcaaggaggactccagacaagaagctttattgtctgcgagtcccagctcacggttacttagaaaaacatgtgtgtgttaaaacagcttcccgggggaccatgctgttttcgcgtgaggaatgaatttggggaaagttaagtataggagagaaggaaacaaaatcatatcgaacaggaatgttctggaggcttggcaaaatctagaagacactttatttcatcgtcttttttctttgcaacatctatcgaatctttcttcttttgactttctaaagggctttacccagccctgccttctgggccccagaggtcctaaaagtgggaggactttttccagtgggaggtgatgctgcccctaaggccttgcagggaaggaacaggcaggggcagctggccccctccctcctggggacacttgcattttccctttgccattcagaaacaaagttaggtaaggaggtgagaccttcctgggagctgccttttgggaaatggtgattgtgacctcaaatcatgtcagagtgtgacttgctagaagagaaatggtcgagggaagagggggcgggtgactggaaccctcaggtaacaggtagggatgcagcagcagtgtcctggaaagacccttctgtgcattttgtggggagactttccaggccaaggcaaggagaacgtgtggcatcttctgagagggaaagaggagctcaaggaagaggggaaaggtcattgcccttggaccttgcaggaagcaaggtgcaggggcgggcacatcgtattggaggtcatgagatttgggatcctctcagtgcactgggaaggacatgaccaggtggttgtgtggggacatggctctagctgctttctggagacaggactgggccaagagttctctattctgttccattggtctatgtgcctgtttttgtaccaatgcttttttggcagggaggtcacagaggagaccatttctgggcctggaattcctgagagtggcctggccccagtggggacagggaggggagagaagcaacctggggcacacttccctagccagtcctatgtttgtgagacctgggagggctgtggtcagggggctgggccctgggggcaacagtgcctttgcatttgaacacaaagtgccacttggtataatgggcacagctcagtcttggctgttcttgagttttaaacaaatcatgatccccaccttccaaacaatttagtttttttcccctagctagccccatcacaaacttttgaagcatgaaatgaattttgctggccctcaccaataggatcctttccctagataatggattttatgaaatggccataatcctcctaggtaatgagcaaaagctacactctccacttgggtccagcattcctcttcctgatttatgatagattggttaaaatagtaaactgatagcagttgcaaaatagtcatcaatcaccaggcagtgtcgcttaaactacagaaaggtttccagaagtgagatgctggaagccagagagagaacaatttggcaataccaaaggcataaagcaccaatgaaatcaaatctctgtatttgtattctgaagacagaggagtagagtggctcagggtactaaggaaggaaggaaatgcaagcaaacccgttccccaaggtcaaaggacaccccctcctgagctccaggctgcagggggccctgcagggggaccttcagtccagggagttcttcagggggactgtccagagggctctgcagggtgctgcagagctctcaccagtaggtttagtgttctgtttctctttctagacagttttggaaagttttccaatttctaacatgtataaatatgttgggctaatatacagtaatggcttttaaagcaaagtttttcaaaagtataagaggattgaagtgcaaagctatcaaggccatgcccaggtctcacccgtgctccctcacccccttgccccttcgtccagacacctggcctgccacacccagcccaggacagaacttttctttcctcctgtacgctgagctgtcagaccatgagtgttcatcatgggctgaggtgatagttgatgctggagaaactaatgttttagggaccaaaacaaggtctgcagcagtgtttccatggaactgccttagtctggatgagtaacctcatggctgtagattacttgcatcatcagttcaggagaaaacattctcctccattggatgaatagatgaatgagtggtgagaagctgtagagatcttgtgtggtgtcaacgccctcatttcacaggggaggaaactgagtcccgagagagggcagcgacttggttcaggtctcagggaattggtgaaagagattggagtatggcctcagcggaggtgtgactgccagtgacacctgccggaatgtgaacttcacggatagcgctggctcacacctgtgttgcttagtgtaggctgctgagctgaccacttgcccttgattatttcaagtgaccgcgccatgtgccaccttcagacctgctcccagatcgatcccagagcctagggtgggactgtggttgctgtcatcataggtgtgtgattttccacaggtcatataaccctcttgagcctcatcttcctcttctgtgatatgagagactcttcctgcagaacctggcgtgtaatacatgcaacctgcatgcccaccttcagtccagcaagcagccatcaggcaccaattctagaccgagtcctgggccgccacagaaactcaaagttagataggagctgggtgggaaggcaaggaacactcaggattttgaacacagctgtcaacccctattccttaattgagaaaggcaaatcctgggacttgaataaggagattgggaagactcatggctgcactagtgcatgaaatattatggtaaaagcaggagaataaggcagtccttttcttagccctgttcttctccaggccagagcctgggctttaacactgactcaggcagcagcccctgcagaagctacctgcagccaggttggcctgtgctcccagagcccctgccatggatgtccataggagcctctttatcccaaagccatggcttccttctcaaagatagggctgtacttccctgctttcctggtgcccacacagctgtgcatggtggacgctccatgagtgtttactcagtgaggatgcacgggagctggctgatgttgagaaacggagatgagacttcagggctggaaaacacagctgcctgaacccacgcccaggcgtcacccatgctccctcgtcccctcgccactctgtcctgacacctggctggccacacccagaccaggacagaactttgctttcctcctgtgcaccggagctgtcagaccgtgggtgctaatcatgggctgatctgtgctcttataggtatggcttgcaaaggacgtcttttgttcctgttagagtagctaacctctaaatctatttaatacctcttccctggttgtccatcattatgacacatgattttccaaaggatttactattagttagcagcacagggctttctccctggggtagcagctacttgcagtgaagaaaatgcatgttcaatgtagcaatttgtctttttttatatatttattataagagtaaatgagttattgttggagacttcaatattattgcaaattaggtgctgcaaacagagccgggcccatttattatgtttctcaactcccacagcaagcctaccagttcagaaatcagctgagagttgtggcccttcccagggtgagcatggagggacccccggggtctgggcatgacaaccacgacgtcacattgtgccagaggcaaaagaaacaggagccacctgtgcaggcgggtgaggggccctggaagggagcacaaagtttgttgtgccaggtggtcagtggctggtgggctgacagctgtggtcagagagctgtaggaggtggagtgacctcacgctgtgacacttgctccaagcccatagctgtggtcatggagcagaggtgaggtggtagatgtttccagagtggcccctaagccatgaactcactttcaaggtattggcagtttaggccacagagactggacccaggttctgatttagggtgtgccccgtgacagagagtggtggctggaattaaccagcttacagtggggtcccctggaatggtgcactccccagtgaggagtggctgctgcctagtcctgtcctttcgccacctgcccagactaggggtggacacaggggctgcaggatgcatagaatgttagggtcctgcctaccagagatgaaggtcatactgcaaagtgggcatgctggctgtgtgtggtcaacaccaagaagtgggcaggctgaggccctggcatacagccctgctccatggctggaagagtccacagggaaggccacctagcccagtgatcaggagcacaggcttctggtgacaagccagcccagattggagtccaggtgtcgtcacctgctggttgtgtgattgcggacaagatgctcaactttgctgtaacctcagtgtctcttctgtaaaatggggctgataatccataggtattattggcgttaaatgagctcttgtgcttgaaacactcagcatagtactagcccatggtaagggctcagatatgtcacttgttcaattactattcagtaggcttctctgaacgtgacaggctaaactcgaaacattaattagtcacttcatttgatggcaatagtaataaatgtgagtgacagacacgaaagaggctaccctcagtgtaccacccagggagagccagagttaagattttggaatatatgcttgcagtcttctgtgttgtatatagtgtgtgcacaattattcacacacacatacctgcctgctttttacaaaatgggattatattgtgcttgctacctcgtaacctttccacctgagaatggatactgtcattactgatgcctttccgttcaagtttttctgcagttgcagtctcaaactttttggtctcaggacccctttataccctcaaaaattattggtagcttcaaagagcttttgtttttgtagtgtgtatttattggtatttactgttctagaaattaaaactgagaaatttaaaagatattttaaacttatttaaacctaatagtaatagacccatttcatgttaatgaaaacaaccaatttttatggaaaatatttcccagaacaacaacaaaaatgtgaaagatggcattacttttcaatttgacagacctctttgctgtctggcctagtggaaggatgcattctcctagcttttccgccttgggtctgttgcatagcagcctctggacacccacagtgtctattcaagagagaagaagagtgaaaaacacaaataatgtattagtatagagatagttttgactttgcagaccccttgaggcagtcttggggatccccagggctctgcagtctacattttggtccgcttttgaatgcctacagaatgtttttgaccttcccacctgaggctgggctgggaacatccctccagcaaccacaggctccccgagcctcctcatctgaccgaacctgtgtccacagagcatctgagctctcctctctatcattgtgaaatggaccgacataaaatctctcttgtttgcagagttcgtaacgacagagaacatttccataccttctcacaatcatctttgtggggagacagccaggagactgcaccctcttgcctagaacacccatgttgtggccagatccccatgtcgggaacctgctccagggataatctgctgcccccaagtcctgggggtctggttccatggggtttgctcatcttctaggactttggtcacaggggaacaatccaactcctgcctcctcctcaccccagaggctcccggctgcacacagctggccagagtgacggtgttcaaccgcctggtgcctccttttcagaaccacccctcccagccaacagagcccggtctgtgcgggctccgtgggtctgtgtgagagcccctgtttgccttggctttggtctgtcttctcaactggctggccggcccttttcaaaaatcggctgggtgttatgaaactttattttccaaagagaaaaatttctgggcctgtagcaagagggaaaaaagttatactaataatcaaaagcaccagtagtcaaagtaggatggtgagggtttggagaaacactgaaagttgtcacaaaacactgcagctcacccatcagccgcagcccccgtctgtgcgcagagccctagccatgctggcttctccctgcgtcagcatttggggaaagacggatgtgcctggaagcgggccttgctcctgtctgtgtagacaggccggcgttgaatgtctacgggtggcatctatcatccgtgacctgtagcatttgtgctttttgtttatggtctctcggcatgcattgttttctcggggctgaaatatagcacgctaatgaggtatctctctgctcaggaggacgcaggcagctcagaaagacgcctcggcagcatgctgactagtttgtcaacagccactcgctgtggcagctgctgtcccagccaagaagaaaagagtaggaaatgctaggagaagctgcagctgggggtggagggtactcggtgcctgggaacctcagctcagttgagtgtctgccctgcaggtgacttgatgtttggccctggtgccagtcatttctaggaggtatacgacttgggggtgtcaagcaaactaggttagggtcctagcttcccagacactttcggcctgaaacactcggctcctggagcctgtttcctaacccataaaacggtgaggtgacctctgcctttgtgggtgtctgagactcgccagtggcctgtgttctgtgctgggtaaatggcatcagggagcctgctggtggtgcctgtgcctggcatggggctactttgtatgtgcaggtgtttttcctaagctgggacctggggacaggcatgtgccatgcatgtcagcactcagtgtctgagcagagttaggctgactcagtgtctgttgttggctctgggtgctaacaggcacagtgtggacaaaggagcctggaaaagtggaccacatctagagggaaggcccataaagtgactttgggctggccatcatagcctagggattcaagctctgggaacgagagggaccacagtgctgctcacttggaggagggtatatggggaaggagcaaagtcctttctccgtggggaaatggcccttgaggctaggcagagaagaggacggtcttggaaggatttgcaaggagagttacagtagacacagcctgtcctgcagaccccgccctgtgccgagtgctaacggcggtgctaacagctgctgctgtttatggagcactagttgcagccaggcttctgcagacagtattcctcttcttcgcctcaggacacccttgcgtgtgttattacctataaattctgggcggtcaggcacgatctaaaccccaggaggattctagtggaattctctaagctgactataaaattcacatggaaggcaacaaaacgccaaagagccaggactaaaagatgacagtgatgggggatgaggtgggggggctggcctaccagatgctaaaccatactataaagctgtagtgattaaaacacagtgttgggacagaacggaggggccagaaatagagacaagtacaactggggatttcgttctcttttaacaaggatggcagttcaaatcttagggaaagaatggactgttcagtaggcagtgctgagacaattggttatggaggggaaaagttaaagccatgccaaatgctccttacaaaaataaatgcaggccgggtgcggtggctcacacctgtaatcccagcactttgggaggcctaggcgggcagatcacgaggtcaggagatggagaccatcctggctaacgcggtgaaaccccgtctctactaaaaatacaaaaaacttagccgggcgtggtggcgggtgcctgtagtcccagctactcgggaggctgaggcgggagagtggcgtgaacccaggccacggagcttgcagtgagccgagatagcgccactgcactccagcctgggcgacagagcgagactccgtctcaaaaaaataaacaaacaaacaaataaataaatgcaaagtggaatcaggagctgaatttcttaaacatccaaaatggtggcagtgggtctctccgctcagctgctccagcagccacacttcccccggaagctcactgatattctcccagcagcgaagataaatgagatcaaatctcaccaggaggaagatttaaaaatcacttaatacagtttaaaatactcaccggagaaatcagacaagtaggggatggcagaaggtggaggagggggacttttcttgcaggggtttgcagctggcagggttggaggagggacacaggtgagtcacatgccctctgaggaaggcctggctccactggggctttgtgtgccagctcccagtgggtcggcagggaggagcaaggttctgctggctctgctgaggccgcccatgtcagggtcaggcacgtggggtccgaggcaggtggaggctcattctgaaaaggcagatgcacttgcagaatgatgtttaggatttgggccctgtttgcacggccctttccgtgtccctgtgcttaactgtaggttccttgtttaatattcttttacttaagacgtgcccccaactgtgtaagcttcaggccccatggaacctgggctggtccactgctcactcagtaggcagcagtaagttggaagacaagaggcctgagaaggcctgggaggagcggggcctcggccttgggtcagccggtgatgcatttgcatggggcttggcccagctcctcagcatgaccttggggtggcttgcctggcctcccctcctcctccagcaggtcagagcctgcccctgagcactgtccctggagctcttcccagcttgcctatcacaccacatcagtctgaactccctgagatcagactgtggacccaatgcacagaccctgggtcacttatttgtttctccagggccttgtgtgtagatatttgagaaagttttaaactattttgatgtggcttcaaaatggccacgcatccttcaaaaaaaatatgcaaatacaacatacataaccgtaaagtgcatgcatcttaagtggagggcgtggtgaatttttgtcgtttgaacacatccacgtaaccagcacccagatcaagagacagaccatgaccatgagccgaagcccccctgtgcccactcccagtcactagccaccactcccccattttgggacaaccatacttctgacttctgagagcatagcttggttttgcttgcttttgttctttatgtcaatggaattatgcagtgtgtgcacttttctatctggttgctttcttatgtttaggggattcattcgtgttattacctgtagtcgtggtttgctcttcttattgttgaataatattttttcctgttattgtggatatagcacaatataccaacgttttctgatgttgatgggcatttgggttgtttccaatttggggctattctgtgctgcttatgaacatccttgtacggtctcgatgaatgtctatgtgcatttttcccaggtatatacctaggaatggaactgctgggttatagggggcacatgtggtcagctctgataaatactgccagctgtccaaagtggttgtaccaattgccttagttttgatactggaatttgctattaaaagatttattttctcgaacattcttttatattaacatctaggaaaaactgttgagatcaatatggatacattaaagtgttgactgagcctgggtccctgatgagaaactgaagaattgtgaacttcagaaaaatagacctgggggaatattctgtgattcactgactccctcacttacctatttgttcttccttcagccacagatattcattatgtgtatcctccctcccaggggcagagcaaggaagtcaagacaatcttttctccttacgataccaccgtcaaatgtattagttatttcttcttgccaataatggctctaactgaggaagcccatctctttatacaaaaaattaggtccaggaagagctgcctaagcagaatcatggttgcagtaaagtcactttatggtgtttaaagacttggctgaataaaggggaaagtttaaataaattagtgtctagctatggactgagacagtatgaatccactgaaatatttatgaagaatcttaatgacatagtacaatattaaaaggaaaaaaaggatacagaattacatacacagtataaaagttatttttttaaactcatatcctgtcacaaaaagaaaaaacacacttggtctcatttttctggttttaaaaatctttcggccaggcacggtggctcacgcctgtaatctcagcactttgggaggccaaggcaggcggatcacaggtcaggagatcgagaccatcctggctaacacagtgaaaccccgtctctactaaaaatacaaaaaattagccgggcgtggtggtgcgtgcctgtaatcccagctactcaggaagtcaggagaatcgcttgaacccaggaggcagaggttgcagtgaaccgagatcacaccactgcactccagcctgggtgacagagcgagactccatcttaaaaaaaaaaaaaaatctttcttctggctgcagtcctccagctcaccccttcttgcccaattctgttatctcagcatcctcagaagctcagtctgcgagcatggagaggatagtgtgtgtctcctccggcattgccccgtggggtttggaatggcgctggctgctggctgcctgggcctggcattagctcatggatctcggttgcggatcagtttccttccccaggaggggcagggacttcactttctatggcttatgtgctttcctggggcccagcatgaggcctttcgccagacactgtgcagcccagacttgttcccaggacaatgggtgagatgaaaaagggcttggtactagtggaggcacttagtggctgcagctgagtgttgggaagggctggagagtcagttgcagccaggtctggaggggctgtgtgcccagcttcagagcttgggttttgatcaggtttttgtgttagaatcctcattctggtggattggagggagccccagagtgaacatagagagacctcctagccaggcaggagataacctgagatcagtgcagtagttcctcacccgtgcgtggggaggcagcatgagcagttaggaggaggatggtgtccacagtggtcggatggcaccccagccaggccacggcgggctggacagcactctcaggtgacacgtggccacctgcctgcctctggctgcggccccaccacgggctggatgcctggatgaatctcaggctggagtcacttaacggctgggctgtcaccctgcagtaacccataattactacttaggagtttgtggacgaaaagcagtagattccaattgagtgtgttaaactctgcacgcgcctgttctaatgaggagcttgtaacctatgagagcccgtctgccgcgggaggcgggctcttgagccagagaagccagccagtcattttctccagcctctagctgagcctccacggccagccatatttcagcatttaggattttaagtgctggttaaaatgctcatatagggaagtgtgtatattttcatatttctgcacatcatgctagagacgagggtaggaataaatcggtgtggccagaggtgccgcttcaagctgctttattccctctctgtgcacagtgttaaactgggctgtgtctgacttcccaaccttcatcctgtagggggctgttactggggaaagaaagttgtcttaaaggaccctggagtgtgagggatggaaaagcgaaaggtttgtctctgcaaacaggtagtgctgagtggtcgccagcttagagcccgtcgtccagatgctttgttttctctctgttttacatgaatttccactgcacagccattggagttttgctagttgggaattttaattagagaattgggcaaacttcattacttttcattcaggtttaaggcaagagggctgattaaattcatccatcttccccaccgaagtccagcctctgaggtttaatcccattgcctgaagtccccatcaccccgccatcctccttcctccttccccgcctcgcagacaagggctctctttccaactccaccacctgttccagccccggctctgcccgcaggaggggaaaccaggtcacatctgtggtcattcacaaacaaacatagctctgctttgccccaccaagaggctgagcctgtggtttttctgtccaggtcctgaaacaccccagacagcaagaaaaccagaaaaaagcagctatgggctaggttaggacaattgaggtatctgcgtatgagagagattataaatgtgtacctcctggctaaagtatgtctttctctagcagaattgtgatttgaactgcttttgaaaattaaaatgttggtatgtgaggtgaaaatgagcttaatctggggtgttgaataattgttttcagccattgaacacaagtcccagcatagcatctacctagctacatggatggaaatgcaaatatccccccctgcccccaccagggagcaaaatgtgaaatttgtctttcttatttgccatccttcgaaggcagcaccccctgttaccatgataacataaccttgtgcacctccatttctgaatctgtaaaatgggggcaagtcactaaccttataagatggtcggtggaattaactaagcaaatttatctaaagcacctgacaccctttcaggcacacagaggttccaagatcttcaatgtgacgctttcaagaaaggcaactcaagttcagggcttctgaatcctactccaaataccctgtcatagtcaacacatccctgaagttccctacaccatgcctagaagcactgaggctgggcagtatctccttgtgaaaggcctggcccccttccccagggtcctgcttgaatgtcagaggacaggtggggaggaggatgggtggagaaggacagtggcagggaggacagtggggagagggcaggtggggggaggacaggtgaggggaggacaggtaggggagggcaggagtgggaggactgtggaaggtggacaggttgggggaggacagtcgtggggaagacagtggggagagggcaggtcaagggagggcaggtgggaggaggacagtgggggaaagacagtggtggggaggacaggtaggggagggcaggtagtgggaggatagctggggtggcgggggggaggacaggtgggggaggacagtgcaaggagggcagtttgggggaggacagtgtggggacggcaggtggggggaggatagtcgggaggacagtggggagagggcaggtgggggaggacagtgcgggggagaacagtgcggagtggcacggtcgccgggagaacagtggggagaacagtgggagaagacagtgggggagaacagtcgtggggacagtagagggcaagacaggtgggagaggggcatgtgggaaggaggggcaggtggagctggcggcatcatgaacttttggaatagcaaagggagttggggctctgaatgtcagcccagcaaccaaagatagctggcaacgaatggtccaggtcttttgggatggaatgtcataggggacaactaaggccctgtaggttgattccagaatacactatccaggtccagggtgcagtggctataacttgcagatcaaacaattcacaccacttcaggagttgaacttggctgtgagtttacgtctggtctctggacccatgtggctgcctacagtgaacttgacctttaggggctctggcttctggaaggagggagttccaggagccacatcctccttccaggaggccaggtgacatggacaacgtgagggaaggcagccagggcgtgaggccttgggttgggtctccagggcagctcaccacagggaaggagtgaaggtggtgaaggatcacccgggagatgctgcttgggctggagggcgcccgctgcaggcgtcagctgctgccggctgcgggatgtgatcagcactcctcacttcatggcctcagttcgctcgcctgtgaaatgtaggtgtgtgtccctggagtccctccaaagctctgtgaatttgtggaacgcagatggagggaaggtcaagcttgggagagggcggtggctttggctgcaacgcgaagccgacaagcactggcagcaggcctgctgggctgtctttgagcgcgggtgtctgggcccaccctcctctgtcggatccctgggtcttctgtccctcactggacatgtggatctgaccgccatccaggacgtcccctctgggtcctgctggcattactccagaaccacttcatcttccttgccctccagggctgagatagctggtttggtctcacatctggtcttaagtgggtcttttttttttcttctcattttgtctatcttaaaatcaggtttatgaaggtgtaaattacatatagtaaaatacacccttttgaggcatacagttctgttaattttaacaaatgtatacggttgtgtaaccatcacaaccaagatacagaacagttccctctccccagagcgggcatcctgtccttccgtagctgctctcccaccctcctacccccaacagcccctggcacactctattatgtttcccatccctataattttgccttttcctgaatatcatataaatggcatcataaagtatgtttagctggggcttttgagagagaagtaataggttccttccgtgggtttagccttttgtttgcatctgctctcatgaaaaggtctatgcttttatcaagcctaaaagataaccttggccgggctggtggctcacacctgtaatcccagcaagttgggaggtaaaggtgagcagatcgcttgagcccaggagtttgagacaagcctgggcaacatggcaaaaccccatctctattttaaaaaagaaaaattagccgagcatggtggcacgtgcctacagtcccagctacttggaaggctgaggtgggaggatcacttgaggccaagaggttgaggctacagttaactaaggtcgcaccactgcaccccagcccaggtgacagagcgaaaccttgtctcaaaacaaacaaataaacaaacaaacccacgataaccttgaagaagacagccgcactgtacaggaagctctggtgtgtgcaggtatttgtagagcatttgctacgctgacccgttaagtccctacagcagtctcatgagggtagttattattgtaatcctgtttaacagatgaggaaaccgaggctcagagaagtgtaatcattcactgtggtcacatagctcagatctgaacccacttctgtcatcctcactattctgtgtggttgtttggctgagtcttggatgagggatacttgcaatgataggtagcctctggcccctggtggtgggggtagggagtgggagagtcggagaggtagaagaaagccgctagatccaggcctctagcccctatctctacgggggactcccttccaaggaaaattgtctgtgctccagacccccgcagcagatgagtgtgtggaggcctgattttggagagtggggatttgcacccttccgcaggccacccctgtgttcctgctcatacttttgcatagccaccacctgaagttagggcagccccagccctgggggagactttaggggccaggggcagctcagtgctgggctcacaaccacagaacaccagctttcctggcctaggtcacactttgccaggccacaccatgaaggggagagagcgcccatccttggggagcaggatccagggtctgtgagacccaggcgtgggctgcagggagagtgaggtcgtccgcacggatggtggagtggacagaggccagcagaggctgcgcgcccatgtgcgggccaaggggagagcgtaggtaaaggacagtattgcagtcttgggaccaagtgccactaaaccttatgggtaatgggtttttcatcccctgggtaataggagacaccaaaaaatgaggacattacttagtgagtccctcacctccctggccccattcagcagactcggaggaaggacattgcccagcattgagccgtgtgtggatttaatggggtttccagctaaaccttccatcaaatttacggctgtgcctgtctcctgaccttccccctcacacattcttttcagaaatgaagctgtgtgcaggctgtgaggtgtcacttcccccacgctggagatatacagcttgggcctgggttgagacagtggatttaatcaggctgggtccccgcagttcacccgcccctaagctgagtgacattagggtggccgtcggagtccagctagagtgggcagcacggagccagcaagtgtttgtcctgccagccacaggcttctgctcagccttgcctcgcctccttgctgggagagtggcgcgtgggggcccaacatctgctcaccccctgggccggaaggtggggttcttcctgtaatcttctcccacagcccccacctcctaccattgctgccatggcgggagcatcatcagccggcctcactcctgctttccccactatcctaacagctgggctgctcctggctccctctccattcatttcttgccttccatcttggaagtgttcagtgtctgctgaatcctcccaccccaacctcactgcccctctagagcttattgcctttcaaatacagctcaaatatcacaacctccaggaggctttccccgatctcatcacccccagggaagagatctcccttctgcacatcatgcagaccgggtcctagagggtgaacctttctctgtatgcctttctctgttgctgggcctggcccatggaagagacccagtaaatagacactgtcattgtcacagggccatgttgtcagatgcctgctccagagagtgaagctgcagctacattgccaagctcactgggctttgtaaatggcccctcaacctcaaaggcagcagctgcagtctcacagctggcctctggggaggctgccttccgagggtggctcccctgagcctggccaccccagcctcggaaatgctgacaaggcctttccacccgtcccttctggggcagcgtgtgttttcatggcccttcactgactgatcccatgttcatctcaccgactgcctcagaggcctcggggcctggggcggggcagctatagcaacaggcagcgtccagtgcccactcggacacacagggcccttgaggcagctgctggcagcaggaggcgtctagcaggtgggcagagggactcaggcttgaggccacggggaggattaaaaataaaattgcctctgctccctggaagctgaggcctctgtacttggagttggaggatgacagacacaggaggagggagaatctgctagcaccaaactcccctctacctggtcatgtgtgggagcggggcctcacgtgtgggacactatcattcacattcaagtgatcattattatcacacagggccgtgagctaaaaccatacttctgtcattctttggctctaagaaaatgaaaaagggaagtaactccatttactgagcacctgttatataccagataattttacatgcattagcgtgccatcctcatgctggcctcaggaggtgagaacccctattctcatttttccaaagtaaatttgtgtgtgtgtgtgtgtctgtgtgttttggttttggggtttttttttgagacagggtcttggaacccctattctaatttttccaaagtgtgtgtgtgtgtgtgtgtgtgtgtgtgtgtgtgtgtgtgtgtgtgtgtgcgtgtatattttggttttgggtttttgttttgttttgttttgttttgttttgttttgttttgttttgttttttgagtcagggtcttgctgtttgcccaggctggagtgcagtgtcattgatcatggctcactgcagccttgtcctgctgggcttaagcgattctcccacctcagccactggagtagttgggaccacaggcgcgcaccaccacacttagctaagtttttaaattttttgtagagaagaggtctcattattttgcccaggctgatctcgaactcctggactcaagtgatactcccaccttggcctccctaagtgctgggattacaggcatgaaccactgggcacagccccaaagtgtttatgaaagggagtggcagggtcagacctgcgctccagagagctcatactagccttcctgaggggcgtgagtgggtgaggcagaggtggaaaggctgggagcctgcttagtgagctgctgagacagacaggaaataaaggggcctggagtgggactgcggtagcctgcatgctggccccaagccgcacctggtgggtggacccagggccccaaggaaccccagacgttgctggctgggtggatggcggtgcccttgctgaggcaggagaccctgcccaggagcaagcacaaggtgctgggagaagatgccacggtctgtctgtgtcaggcgaggcacatccaagatgcctggggctcacgcaagggctggacggagagatccagggctcagaagagagatctgggcccgagacgcagatgcagaaacacatggtgaaaatactcatccaacacactcacgtttttcctccgtaggtgccagtgacactgtgggaagatgcctggcttcccaagcacacctcagacgctggcccccgatcaatgcctgtggtccttgaaagcagatggccagatgccctgcctgaaaactcccacatggcaagtggtagatgtcacaagccacagagcaccccccgcccacaagatcccccagcctgcttgtgggagggaacatcccattctggtgcttttgatctcttcctgcaaatatgcagctcaggcgacctgggaatattcccccacagtgaacctgaattgatactcaccaaattagatcaattccagccggagcctggagcctgtgattatcaccctctcaccgtgctcttttccttgctgggctgcgtgttggatttccaaaaggcttgtaatcaacagcagagagagctatgtatagcccactccccgcgctggcgaagcccgggaaggccactgtttgaggttaggcttgagtcaacttgtaccatgtacttgggagccattcaaaagaggcggtgcacacacaaatcatgatggggctaatcagaagtttgggtatttagtgggatatgtacacagcaatcattgttggaagcgcccttctcccacagaggccattatcccggagcggggtgctgtttgcctggttttgtctgggccacaatttgcattcacttgatggattgtcagggtcgggggtctcctccttgggaaacagtggagtgactgctcagcacactcttaagaggaaggggagcgctaataccagcgtttgcccaggtccttgagagggcccggggatcctaacgcagtgctagatcaatatgacaggcgctaagaagcttgggacatgcattcacaaaccccttttattgctccactccaagccagggagaggggagctgcagcttgggcacagctagcaggacctggccgacaggctcttgtttgttttcccggctgcggtggcctgcggttcagttcaagtttgccaaagtgatttggagtggccttccccagctgagccttgcgtgggacctgttaagcccctgctctgtcacctgccttctttctgtctggctggatgccgaaaagaaacctccagagggagaagggagtcggggaggggtagaagggaggcctgttttgcccgctggggcaagggcagctgtttctctgggggtaaacactcttagttgccaaaatgccctgcagttgagtgatgttgctttctcgtttggcaaggcgagaggtgtttttgttttatttttggtattttcctgggacatctgtgacacctgttgactccatgagttctctcaatctcatcgtccccgagcattaggaacaaagcccaagggttccacattctctccttttgaacagcaccgccatcacttttatcttcttaattttcagggtgttttcttctcttcagacaggagagaccctgtgcagtgtgattcaggggagagtgggcaccagtgagagacacacaggccgtgagggccatgttccctaacaaacagtgtttggtgtggacagggcctactagggtgtggtgggtggggagattgttgagtttttttttattgcaaccagtcttcagagcaatcagggattttcttttctttcttcgttcagaaacgtgtgaggaaagctgactagcatcgacaatgccaggtttcctctgttgggccttctattcagggtcgctgcttgcatgttccagttctgggtcaggactcatggtcagcgttggctgacatctcagtagcaagtcttttttccaggagaacccaacacttcaaaggcttatcagttagtggtgacttcgtgtttctagttctccatgttgatggctaaaatggagacagttgagttgtccccaagaggggaccaagtctttccttttccctgggggtggggagggtagagtgaaggaggcccaggctagacggccgtgaggactctgtccagaaagggcccctccagcaagggtgatgggttgggcgctgcaggaccgcggagaaacagaacgcatctttatctggtcctccgaaagaagtgcggtggccatagtctcctcttttagcccttttctgcccctgtgtctcagaaaagtcttgaaagggctggaagtctgtgggtgatgttagcctgctgagatgctcgaggaaactcaaatggctctttctttgtatcacgtctttcctgtcaactcataccccaccttgagccagccctcagaagatggttgcaagagacacaccttgggtagtaaaggtggagaaagaatgctttccagttcagacagtcagctcctccatcgaggaaggatgagaaatcacagccttcaggatttcaggccaggcacaggactcttagacttgataccataagcatgattcataaaaggaatgattgacacattggacctcgccaaaatcaaaaattttgctcttcgaaagaccctgttgagagggtgaagagacaggctgcagaatgggagaaaatatttgcaaacctcatacctgacaagggactagtacatagaatatgtactcaaaactcaacagtaaaaaagaaacaatataattagaaaatgggcaaaaaacagaaagagacctttcacaaaagaggattatataaatggccaataagcacatgaaaaggtgttcaacttcactagccattaggaaaatgctaattacaactgagcgaggtattatacacacatcagaatggttaaaagaaaaaatattcataatgagaatgcagagaaacaggagcactcacacatagctggtgggaatgtaagacggtacagcctctctagaaaacagtctggaagcttattataaaggtaaacatactgcataggacccaacagttacacccttgggcatttattccagagaagtgaaaatttatattcacacaaaaacctgtacacaaatatttataacagttttatttgtgatgtccccaaactggaaacagcccagatgtcttttcgtggtcgagtggttagacaaactgtggcacattcataccagggaatactactcagcagtgaaaagggacaaaccatagatgcctgtaccaatttggctgaatcttcggggaattatgctgagtgcaaaagccaatcccaaaaggttaccaactatgtgtttccatttatgtaacatgtttgatgtgatgaaattttagaaatggagaacagatcaatggtttccagggtttaatgacagtaggggtgagggagaggagggcagcagaagggtgctcatcgtgacagaactgtttagtatcctgactgaggtggtagatattgaatctgtacctttaatgaaattgcataaaactaaatgcacacacattcacatatatatatatatatatacacataaaactaaatgcatacacattcacatacatacatacctgcgtgcaagtaaaactgaggaaattagaacaaggcagatgcattgtatcactatcagtatcttgattctgatattgcactgtagctttgcaagacatgattggggaaatctaggtaaatcatacacaggatgtcttcctgttacttcttacagctgcatttgaatctcaaattagcgaaaaataaacaaggtaattaatatatgcaatgcgaattacgtcacgtgtcttcactagcttgtcctcaagtaagcaagccgtgctgtttcccaaggggctgggcctccttcgggacatctatgcttacctggaggctggtgggttatagcgaggtgggggcacgggtccccccaaagcttggcttcgtgaagctggtacccaggtagtggggaggagagaggatgtgtgtcctccagttctccttcagtcattttcacctcttggagtttgcatcttggggatggcttctcctaatgccttcccaggactgtgttcatttgttcattcattcattcatcagtccatttgtcagcagggatttcttgaggacccactgggcaccagacgtggagcccacagaaatgaaaagatggacctttcagcatcagggagctgatggctggtggggagcaggcagtggcttgaatgccacacaggaaggtgctatgggagagtagcaggcacccctcacccaggagtgggtgcactgggcggggtgtctggtggataaagaagaaatcggggagccttgctggaggtgatggtgcttgtgttgcctgttgaacaagtgggtgtaggcagagaaggaatttcttgagaggcagtgttgcctagtggttaagagttggctgcctgggtttgaatttggtctctgtttaacttctcttcttcagtttccttttccatgaaatgaaggcaaaaagggaccctaccttataggcatcgtaatgtggatcaaaccagttcacatttttcaggacctggcccatggtgaatgctgggtaagtgtttgataaattaaatcacacaaatagatgaacgggcgtacagaatgtgattgaagcctgggctatgctgggagaaatcagagctggagtacaggctgtgaagggaagggggagcagcaaagggcagggcctggctttcccctggatgcttatgggcacctctcctctggggagccggctatgctcctggctccagtagagtggagggcaccacacatgctttctttacaggggaaggcgctgttcccttctcttccttacttgccctttccatgcaccctgaccccactgaaaaagcagcagagaggggctttgcacaccaggctgtcctcatttactcagtccagatacctgggagattgtgagaagctggatgcaccttcctggaccagcgacccctctttccactgcactccaggtgtgaccaatgccagtcttcactgagcacagtgggtgaagcccccttcccatcccaccccaccctgcaccttgtgacctcctgcttggctctgcggattgtggtcaccaccttggactacttaaccccagcactttggacaaagcttgacatctgatcaggtgctcattaaaagcactgtcccattgtcgggcccccatccacctctctcccccgtcagccagggaagggaagatttggtctctttgctcacgtgacagagatgtccccacctttttgacctgttgaaggttcttctgggccacaggagaaacgtttgtttcacgagaggtttctgcaggtggtgggcctgagccgcctgctctgggaggactgaggtttgggctgaggaactacgtggtcattcggtggttgatgtggagttggaagcccttgtgggaccttgggcagggcacaggcctctgtctgccccttggaaaagtgggtgcataaatcctgctctgtgcataaatcctgtcccagctagccaggggctgcagaggggagagttctggtgctggcccggtaccagcttggatggttagtgtttgtggcaggagccatcatgctctgcctctcctgccgccacctcctgaccactttactggatcctgcacctgcgtgtttgtgcctgaggggctttttcttgctgctgcgctggtggcagttcagggtgccaggaaattaacactgataatcagtaaccctacttaacaaatgtctatggcagaactggtgtgtaaataccccagctccctcacccctcagctgggtctactctggttctcagaagttctgtgtggagctcagctgcccttgcccagagtggtagggggtgtgccattgtccctgattcaccaccttcggtgtctcttcctgatgtcctcagctgccctgtcatctccaaaataaaccacttgcactcacatccttgtctcaggttctgcccctaagagacccaaacccaatggggttgttgccacttttctgatagatgctgtggatttgaagtcaggaaggatagaccaccgctaacccgaggagtgaccgccagtgtgaaatgtgggccatgacccctgcctggcagagctcctgcccccagcgtgcatagttatgagttatttgactaaggcatcttgccacagccttctcaaatatctcagcagctcagcctgtcctctgtagtttgggaggaaggctgaatggccaggaatagctggggcttctatttcttgtttcctattttagtttttgtccttgttgttggatgacgtggagggagaagggtgggctcaaggtgaataaccaagcccagcccctgaagggagagttcttttcaaaccctggtggcccctgcccgccccccagcctcccctcccccacctggggtatgtgtgtggctctggcacaattaagattcttgctgggtgcccccagcccccgctggccctgctgctgagcagcctgtcttgaaggatcttctgagaacggactccttttctgggagcgtttataagagatttctcatggctcagttcccctatagaaaaccaggaattgtaagtcttacatagctcaagaaagaaagtgaagggagtgagtcagagccggccaagaatgagtgaacagggttggtggcagtgtctcgggaggaattaccaaaaaagaaatgaaaggaaaaaagaagaaagaaaaaaaaaaaggaaaaagaaaagcaaaaccaagttccccccaaccccccacaaaacagaaaaaaaagataaacttttagcaaactaatgtggacagggggcctctgaactccctggcaaagcagttgggcgaggaagcggatggttttctgggtcttcaagtgcattctgcctccttagtccaggcctttgtggacctggtctgggggaatatttagcaaagctgtttattttgcataaacccgagtaatgacccagccctaggggagggaattgtgtggggctgacagcagcgtgatttaagggggagccacctgacccctgcccctcccaaacgtcccctgcagaataaactcgctttcttcccagcccgctgcatgttaatcaatgccgaaggctgaggcccgagaggcctattgtggggacagtcgggtcctcctggggctttgtggcagctccagctgagttcctttctctctgctgctcactctgactttccggaaaggccccaatctcaccctggagctcagcttgctttcctggttcttcccaagcaattgtccgtctctcagatctgtgcactttttgaaagcaaaactcattagtatattttttaaatgtgtttttgtgacagatgtcccttagaaaggacaccccttagaaaggatagctgcctggggcccgcgtagctgatagctgcctgggaccggcgtggctccgctgactcaggctgggtttcagctacgcctctgggggactttagccttgagtatacgcagcctgggagtctccagtgctcagagtgcctgctctgttccctcctgagcattctgttcccttctcactctctttctagagcgccagtgtgggatcagttcttactgccaggggtgggggctaatctgtgtcttgtgtccttgaggaccacaaatgaagacatgcattaacccttgggggggggtaccagtgatttcaaaccgcccccccataaatccccccacttccattttacctctttcctcccatatggttttcttttctttcttttttttttttttgagacagagttttgcccttgttgcccaggctggagcgcagtggcgcgatcttggctcactgcaacctctgccttctggtttcaagcgattctcctgcctcagcctccggagtagctgggactacaggcgcctgccaccaagcctggctaatttttgtatttttagtaaaggcagggtttcaccatgttgaccaggcttgtcttgaactcctgacctcgtgatctgcccgcctcagcttcccaaagttctgggattacaggcgtgagccactgtacccggcccagtatggttttctttctagtgcctcaatgggtgcctccttgaggacctggctgatggggaggggaggggaggggctccccggtggaggcttgggccaccaggctgtggacactgcatggacctcagccatccctgcaggctggcctggcttccctctgtgtcagcctttccagcgtttgcagccagcaattctctccttggaaactgggagggaaaagaaaacaacaacaatgaaaaaacaacaacaaaactaaacgtgtgaacttggctgtaagtatggagcagaaaagttttgcttggatgtggcactggggaactgatggaaggaacagtcctttgttagaaggggaggaaggggaagtgaagtagtctctccttagaattggggtgaattgttatgaataaaaaatacatacttctcagggctggatgcagtggctcacacctgtaatcccagcactttgggaggccaaggcaggcaaatcacctgaggtcaggagttcgagaccaacctggccaacatggtgaaacgccatgtctactaaaaatacaaaaagtagctgggcatggtgacatgggcctgtaatcccagctgctcgggaggctgaggcaggagaattgcttgaacctgggaggtgaaggctacaatgaactgagattgcaccactgcactccagcctgggtgacagagcgagactccgtcacaaaaaacaagaacagaaacaataacaaaaacaaaacaaaaacatgcttctcagtaagtttccctgggaggatgggcccggaacccagagacacttcgtctggtcactggtctcccctcgtcttgtaatcccttccttgcctctttttaaaaggaaaggtttgagcccactgtggttgctatggttttctaaccaacaccttgatatttgcaaagggctctgaagtcattagagctatttcttgctcatcacctcctggtgagacagatgtgactctcccctcccattttatgggtgaggaaactgagattggagaaggcagacaagggccagggtgtcctggagctgtgtgaaggttctagggttgtgattcatcaagccaacagttagaactgtcatagttttcctgtccctctctgtccctgagtgatcttgggcaggttggttctcacctgccttgatggtctgtggatctcatagcattaagtgtggctcagatttctccctcccttctttcccccaccctctctccgccccaccctgaggtcagcctgaaggcagccccctagccccaccccaggcctagtgggagactcagacacaccaggggtgtgggtaggcgagggccatgaccccagaaggctgtttggggtccagagggagcccagaggggccctgtcttccctgcctgaggcagggtgggatccggcatgtctcagagatatgagtattagccaggcccaccaagctggggtgggggggtattgacagtaataaggaggtggtttctgttctgaagggtgaaactctgaaggccctagtgctggtgtggtggtaacagcagtaaaaattttagcaccaccaacaactggcattttgttttgaaggtggaagtgtcaacaggtctctaccatggcttcctttgaaaaacacacatacacacacacacacacacacacatacacccacccccccacacactcacacacacccatacacacacacacacacacacacacacacacacacacacacagccttcttcggaggccttggccctttttctcaaggaatccccagcttgggcgttaatccctcaagagtcaccaagagttaactcttgagaagctcgtttattcatttttaccctatgtagttctacaggcagcctccaaaaatgcatagtgtgtaacagggctgaacaaaaagtggcggagatcaggggaaagaaaaaaaggggatcatgaaatagaaattaacaagttgaagttgaggccagtgcttgcctaggggcaggggaggaacgtgtccacctctgtcccaggtggcctgtgtgagggagaggggctgggggaagagattcctgcactgttccccatggggctgcctgcgggcacatgcctctccccagcaccacccccactgacacgctccagccgccacgccctctccatcacaaatgtggccacagctcctggtcttgtccgggtcagcctcagaagtagcaaactccccgtgttgacttcctgttaggggaacgaggattccatcctttgagtcctaaacctctgaaacagcatgggcccctgctccctggctctgcccagagttgtcagagattcagagaatcgtctctcagttttgctcaagagcctgaacactaccgctttcctactaaaggctaaaaataaattttgaagcaataaaggtgatcacagtagagacagttctccacttacaatggctcgactttactgtgggtttactggggcatggtaagttgaggagtaaatgtgttactttgtaaggagggcaaagattgtaggcacagggtttttggaggccaggggattgattctgttgggtttctagtctcctctggatgacatcaccaacctgaaatcccttacctgtgtcataacaaaggacactttgtgtaattttcttagatactcacatctttaccactctattctggaaaaaaatacccatttaggccttgccgttaacatgtctgatctcaggcctgaagatctcttagagactcagtttccctttctgtacaatgagtgggtttgactgatactcatgctgagctggtatcttttatcctgtatttatataacatggtcacctctttagggtgctaacattttatgagacctctttaaggtgctaaagtctcatgatatcatccagtaactctaccccatgaagggacattttattactcattaggcatcaatgtcaggttcagcaagtcttatcttgatgctgacccttgggaactgcacctttctgctttccaccgttcagaggagttgatacactgtgattttcagtgaagggggaccacaggtccccttcacctgtggtcttttcttgttgctgttttgtggagtggtttccatccaccccctactccctcgaaattagggttaaaacgcaatggcataaggcactgatatagattaaaacacacacacacacacacacacacacacacacacacacaaaatgattgtcataaagaaaatcattccagtcctgtgagtttgggattatattttccccagacatttactgtgtttatagagaaaaataaatatctctgtaaacatgtgttgtatttacagtgaaaataaatatctaaataaatattaagcttttaaaattggagcactcgcagaaggaaatgcaaatggatgtgagcgagggctgcctcacttggggcgtgcatgcctggattcgcactgaattggggtgcgtttgtctttctttccagctcggagtgcagagccatgcttcagggaggggaaatgaacatttatggagcacccactatgggctcgacactttacaaagagagcttcattttatcaccacccggctctgggtggcaaggagtatctgtgttactttgtaaagagggcaaagattgtgggcacagcgttttcggaggattctgttggtttctagtctcctctggatgacatcaccaatctgaagtcccttgcttgtatcataacaaagtgtcctttgttattttctcagatagagaaaatagatgaggaaactgcagctcagagaggtgaagcgacttgtccaaaatgacagttaccagttggggtagctggatgttgttctcacccagaatgaaagagcaagttatggaacaaatctgtacatggctgctggtgctaagacttttctaaatccaggaccagggttagaaaagccaggagctatggcagttgtcagcacgtggcacctccagacacagaaacgaaagggtctgcggtggagtcctttttcctctactccctccgggagggcctggctgctcacgcatttacgcctctctccaaacactgggtccttcactggaaactcctctgaaggacagcaagcctcctgcaccccgccaggagagctctttcctggagatcaatctgcagagagcaggctcattgtgagccattgtgagccagagcaggctgcagctgggcctcatctgtgcatttgtgttttacaagcaggcgtcttggtgggagatgggttttgcagatcagtgtaatatagaagcaaacacttgaggatgggagggagagcacgtttctcactttaggggtttgcttccaggacttccttttttggaagtatgttctttttctctctcatacacacttgtgtgtacacacacatacacacacacacacacacacacatacacacatgcacacacattccaccccacagcctgttcctcaggctgcagcttccccaaggaaggcgagtgccccgagcctgctcctagctgagcctgcgcaaggccatcagccagtcttgtctgggtcgaaaaggtctcgttggctgtgtgatgcaacttgcagtgaactgagggtgactgtgggcgtcacagcagcgtctcagaaggccctgttcagccctgtctgggacctgtatataacggaactcagtctcacctctgcagaataggaatggcggtgcccatcttcctctttcttgtggctactctgagggttaagtgaagtcatcgatgaaaatacgctttagaaatgaggtttgtacagcgagtgtaaaggcaggctgtttttctaactggtgtccaagccaggtgtggacctgcagtaaaatgcaaatgaccctgttatgtggacaggggccattgtgacagtgagctttgttaggattgctgcatcacccacaagcctgttactgctgagccccaactccagcttctgattccaagggcctgggaaggtgcggaggatttgcgtctctagcaggctcccaggacatgcagaggctgccggccgggggccacactgggaactgctggggaaagtttgctttactttgagttctgaggcaggcaaggcagaagaggcagaatctcctgggggtgggagggtggttacaaaatgaggccccagcttgtttgcagcccccattgcctcttgaatggtggatatcctggctgccttgctcttttcccttccggctctttcttgttccttctttaacagaatatatcccttaaaccagtgcttcccaaacttcagtgtgcaaaagaatcagcccaggatcctgctaaactgccagcttctgaatccacaggtccaggatggggtctgggagtcttcattttaaacacacaccaggtgatggccactgctgcagctgctgagaagcaaggaccaaaacaggcagtttccaaatagtaaagtcacttctgttttgcaaactcagatggcattttctccatgaagctctcattacctagcttggtgaccctgtgcataggatctgagaactcgctgccttggtttcccttctgcaccctagcgatgttaacccttggccctatgagggttctgtggaagaaacaagatgaggggacaacacccagttccttttaggctctagataaacattatttgctgtcttcttctgtcttttactttcacagcccctgggtaaaatagacaagggatgtgcgtggagacggacattgtatccaaaaatcggaggtcagtgatgttgagcggtttgctcaggatggtagaggcggctctggaggtggccccacatctgctgacttccatgttcaggttcagagttgtgggttcagatttcagaatgcggatccatcagagaatctgtctggtcactcactttcctttgcacttttcaagaatttgatcctttttctttttaagagggagaacagagccctcttggctggcaggtgtaaatcttcactttggggtttgtttgtaccagggtatgttctttctcacacacccacatacttaccctcgcccccacttgcataggtaaacagcttttaaatgtgtattttctttcaaaataaagccacttaagctttaccaaaatgcactgctgacatggaattcacatttggcaaacccctgccatccgtgttttactgagtgcagactattgtaaattaagggaagtcactgtgtgtgtgtttttttcttccagactgttatggaagcagagctggtcctaagtaaaagataaattatggcgggatctaaagaggcatcatttaaaaagtgtcaggatacaattgggttcttaaaaaccatgcagagctgctaaattcacatgaaaattgagtggagctggattgcctggggtgacagcgtccttggcattgatttatcccatctgtttggccggcccatatgacttgaggcctctggtggagaggcggcttccgctgggccggtgctgctccgtggcctctgcaggtcttcctggccccagcccccagccaggccactggggagcatgaacaggtccaggggtcttcatagaccactaggagaaagacaccaatgaaaggcaacatccacggagtgcacatcctgtttcttattatttgtgatagaatccttgcaatatcgtcttaaagaatgattctggactgaatctaaccacttcccccttgttgagcttttagattagattacctacaattgtttggtattagaagttctactgtgattaaaatctctgttccagtgctgtttaccacttagatttttaccctggagtagattaaggaggtgagattactgacaaagagtaactgtttccagcaaggttcttcacaacactcttttcagcattgggtattctcatttttaaacatatacttgtaattttttaggtagaaaatcgtattaatttgcaggaaattcagatttgttgtgccttttttttaataaaaagagtgttgtggagactcaatttggcagttgcgtgctggagccagctcataccagctaacaccagcttgtgagagctggttctacgcatctctcccaaactatatgctcagtgtcttctccttggtaccttgaaatcagccacagtgagagcatttacaccatggaaattggcacatgctacaagccattgacacccacccccccccacccccaaccccttgccccattgcttcccccaaaagctggttgttaacatgtgtcagcataccactgcagctatttaacaaccggctatagaggacttgctgggaaaacacacaataataagaaaagcctagggtccagtgagagaagaagcaatggtggttaatattataataattgacactctgtggccaagggctgtatctttgcagtactcatcgggtgtagtgggaggggaaacagtcccttcaaggtttgagtatttcaggaaggctttgcaggagaattagagctccagccagattccccagagtgtgcaaaataaggagggaagggggaatgaaggctggaggtatggtgtgctcatgggggtgtcaggaggcactcattccttgttgtagatgatggccaaaataaaaattccagctggtgctgtgaacctgaactttgacattagccagagccctccagaggctgtgctgcccctcgccgggtccctcctgggtgatggccatgatagcaggatgctgtgcacctcctgttcctggcatctggttcctattttattagaggttggagttcaccctcagcaatctacagcatgcatgcatttcaaaggaaatgcttaattagtccccaagcctgggcttctttaggctcccaaggagaaatgaattttgttgccttgatggattggggaggacaggtggagctctcaagtatgtttgtaagttgcagaagttgttcatttggagactgtgggtgtaataaatggtatgagctgaggcaggagagggaagtgagactcaagtgatgaatggcagagggggcatttattgaagccagttctccatggcaggatttggggccagacaacatgggggaataaactttttttaatgcaattcagggccgggcgcagtgggtcattcctgtaatcccaacactttgggaggctgaggcaggtggattacttgaggtcaggagttcgagaccagcctggacaacatggtgaaacacgatctctagtaaaaatacaaaaattagccgggcacagtggcaggcacttagaagaattgcttgaacccaggaggcgaaggttgcagtgagctgagatcacgccactacactcaggcttgggcgacagagtgagactccatctcaaaaaaaaaaaattgcaattcagacagtttctttaaacagtccaccagcctcttgattgtgggttctgggtgctagtgaccctccccctgagagcccccaggcaggcctgggcctcactgagagagacaaagtcccactgtcagttctgactgactgtccccaggaccctcagccttagatccctggactttggcataaccacaggcaggttggctaaggatgcctgagaaaaaatagccaggctcttggagtcagacttagctcgctggtcctttatttcacatcctgccttcatttccagagcgggtactgtgcaaggtgggtgagtctctgtccacttgagatgcagggtgacctacacaacacacagtaacatctgggtggtgacagccaagtgacaagcagccttcccaaacccctttgtgcttcctgcccttggctgctgctgttctgcccctctttcctgctgagcccagatgtgttcctccccaaggatccagagggatgaagaccaggaacttatgaagcgggcgggtgactgtggtgacttcacatgggccaagaaactcaggggttcattgctgcaggtgggctttcaggaaggggagattggggaggggcaggtgggcagtgcagagttttgggggaatataacaagcatggagtgtgatccaagggtggggaggaggctgtccccctcccccagctcacctcatccccaggcatgtgtttatcccatgaggacagccatgggcagtgggcatgtatctagaaatggtgccaagagtgactgggaggatggagacccctgagttctggaacattctaggcccttctggaaagagcatttggaacaccaagcagtatccttacctgtaggacactgagatggctgaatcagttactgtaggtaaaatcattcatggatttattctttcactcattcttcattccttgagcatgaacctgtgcctgctgtgggggcagcccaggaccagtcttcacccagatgctcgttctaaactctgcctgctctggtgggaaggcagggccctgggctctgagagcctgtcggtccctggctttctgtgacctcacgagctctgggttttggttttctcccatcaggagaacgtctgcctggcacctcctgggtgcaggacagggtctgtgtgaacatgtgtgagccatggagcggcctgccaagggaagtggcactgtgactgaggaaggacccaccttcccaggaggagggacccacctttccaggaggaggcgcagctgttctcaacgccccctgcccgatggaatccactggggagctttttaaaacgctggtgccctggagccaccccagagagtctgcttctgtactgggctgggttttggcctctcttgattccctggtgtttctcctatgcctccagagcctgcgatctaccaaagttggaaaataaaggaggtgaggtgggggtggatgatgtctctcccaactctattggcccctgtgcttcggcctctggcccagcagagagaagggagggagtttggctggtgtggggcagggaggcaggaaggacagagcgcctgagctgcaggctttccctcagccattaaagtttatcgttgccacggacagtgattgaaaaaggctttttgcaggactgaaatgtgagcaatgaaacttgccagttggtaccgacacagggcacttatctcataaaaatatcctccagtgtcaaaaggtttcagtaaatgtggctggaagtattagcagtcatttctggcagcctcaggctcccttggggcctgcagtgaggggctgtaaaagggggctctcagttcctgcaaagaagaagggagggagggagagaaggaggaggggaggggaagcccaaactcagcctactgctgtggggaaagtgctggaacctctacggggcgccccacagcatcagtgggggtgcctgtccctgtgcatactccagctgctgacttggagggtgggagaactgcctaccagaggggccagcgtgccgacttccagccagccagggagtgaggttatgggtatgtgatcctgcttctgctgacctgcaaggaggaaatggagactcagagaggttgggtgatctgcccaaggtcacccagctgttaagtggcaatgtcaggattaggaagctaaagccctcctcctttccagacgctcagagcctgggatgagttctctgtgtctgggagcagggagttgccaaagaccaggctgacctgggcaggcctctgcccactgtccagtggctcctcagggcttgggcttggggcatagctcaggcccgcatctggagggcccttcagcaggaacgaacgttctccaggaaggcctgggcttctcttgttcttgttattccatcaggacccaatatagtgcccaacacaccttagctaattgtgaagcaggtgttggctgttgccctgaggttaccaggggctgattgggggagggctacactgccccccccccgcccccacatgggccccagtgtccacccaggtggtcagtgcactcagcttatcccgtcccctgcccgtcgttgggctccggttacctgcgtaggccacccttcgcccagatggggctgtgcagtcccaaggagggccggcgcttctcgccaagatggcatgccctgctcgctgtgggcacagccacctgagcccagcctcctgccagcagccacacctacttggggagctgggccagggacctggtctcaggcagcacggtgcggggcaggcaaggtgttcaataggaagtcagggcccctggggtgaccaggactccttgactctgacttgaggggacagtgggagtaggattgggtggccacatccctcgagtggtttcccctctccctgcctgtaccagcaggtgggtgatgaggcccactccacacatcaggcccggagcccaggggtgctgggtgcagaccatggggttcaccctctcctgccctggactccaggcaggctggaaaggagtggagcacccagggtccagattcagctggcaaggctggcagctcaggaatatgcctcagggtcagaaactaaggggccaggtgagcaccgggcagctcaggcaagagccctgtccccaggctctagctccagcgcactccctctctttacacactggccgtgtacaatctcgtcctccttcaaggtcgcagccaccacccaatgtctcccagaggacagcctcccaccaagagctgagcccccagctctggcctcctttctgtaactagtctctggacacagccactctgtgttccacagcatctcaaactcagcactttctcgccctcaaaacaggccttctcccctgtgtcccctctcatagttgaggccaccagcacccacctaaggtagttagcatccttcctccagaatgcttgactcgccctccctgcatccccgcgtggcagagtcctgctggccctgcatcctgcattgagcatgagtgcacccctccctccttgccgcctctgcccttcccgccctggtagaggccctccatctgtcacccagtggtcacaaggtaagaccagtgtcttaattcatccccttgtctgcagcatcacacacacaccccaccctccacaccaacctgtccctgtcacccccttgcataaaccttcctaatgtctctccatcaccagcagacttgtgcccagcgtcattacatcaaacaagcctagtcgcagcccagccctcacctgctgccttgccgctgatgctctgaccacacagggctctcggagtcccagaagactccactgctcctcatccctgtgcctttgtgtgtgccttctcagccctctcctcggcttggcttcacctgttgacgggtgccctgggtggtccttgagacctggcccagcactttttcctctgtgcatctttagagcagaggctgggcccgagatcctgctggaggtccgtaaaccagagaaacttccctgacctgaagatgtgggctgcacggtggagactgaactgggagcctggagactctggggctctgggtggcaatggcctctcgtaggaagatcccacagggctcatttatccattaccatggggagtgcgttttctgtagtcagggcttttgcttctcacgttattcagccgggctgtgtaatgggaaagaacagtcaccatctgcatggcatcttcctcgccagccagtgggcagggcaggtggctgcttaaggctgcaagctggagaatcgcagacgagggttcagatcttccttgacagttcctcactgtgtggtcttggatgggtcatgtactcctcaagcctctgtttcctcagtgtaaatgggggtggtgatcataacccccccaacacacacacacacagagttgaaatgaagagcaaatcaacacaggaatatgaagtgcctacaaccgtgcccgcaggggaacttgcagcagcttttgtcattgtgtggtacactgagtgcttcccaccggactgctgggcatgggaaagcaatcttactatcaggaacgatgcagctgtgatgggtgctgccctcaagggggagccaattgatcctttttcaccacctggtgaaagcccccagcagggggctagactgtcctcaggagccctggtgtggacagcacaggatggcctcatgcccacatggggccctattataggtcattaaacctgcccttggcactgtggggtcagcaggactggttgatagtggggactcttatagcagaggagccatggcctggggggcctgtcacccaggggtgacccttcatgccctggtttggtggtctgtgcactcagccgtgcttggctttggcctgagtggggctggccattggggaaggtgcccaagactgtccagagcgtggcatggacatgggtttcagggtgactcatttgtgcacacttgggtagaacaagagaagtggcatcctcgcctcccctctggtgggcagctgcatggggacccctttcccaagccccttgcatatggaggccccctcttctgagcactggatctgcttcccgtgcagactcatgctctagagtcatccactgtgggtccctctcagcacctgaaaagggaaaagaagcctgggtcctgggctgagaactatgaggcagggccctgcagccatctgtgatgtgggagaaggcagtttccccttcctaggagggaagacaccccctgccccccaacagacctggccactgcttgggccccctggctccagcccctcccaccgatgggccacacatagcatgtgctctgaagctgaagctgtggtttaggggaaaccaatgttatgggaacagctcccagctctagcttgtgtcactccagcctggaggcagattcagggtgggtggtttggtttgggaatcttattttgcccagaaaggaaggggggagccagccactaaggagagtgctgaatggctgatggctggaggacagactgtctacaggagtcagatgcaggctgagaaggcttcacgttagtgcctagatcaccccccgtctctgcctgtgcctggaaaatggcatccctgacccagggtggggaattggggtgcagtgttgtctatggcttgtgcttgtgctgaggagttaacctccagcagagaggctgtgaggctcccccagttccccggtcccctgagccaccagaagccataggattgtggcatgattgttgtcattcattgggaataaatgcaccctccgccttttggctgacgtggggagggcttgctcctgcccaaagtgctcttcctggttgggtcccacagagagatcacctggaggtgcctcccacctggtgttccctgcctggctgggccctgcagcctcttctcaaatgtggccctactgtctccctccccaccaagcccagctcccctcccctgctgcccttccctcagccactatctctggtcagccctaccccatgccagcttcctcccactgcacctggctctgtcccttgctgtgaactgtcttttacaaagtgccatccagaaggaaagaaatgctcaaaggacattgacttcatggccccagacctggcaacctgatgcccagaggtataaaaatatgcctctgtgactgtggttagatcgtgcacaccccctcatttataaacccactttaggccgggcgtggtggctcacacctgtaatcccagcactttgggaggccgaggcaggcagatcacgaggtcaggagattgagaccatcctggctaacacggtgaaaccctgtctctactaaaaatacaaaaaattagccgggagtggtggtgggcgcctgtggtcccagctactcgggaggctgaggcaggagaatggcatgaacccgggaggcggagcttgcagtgagctgagatcacgccactgcactccggcctgggcgacagagtgagactccgtctcaaaataaaataaaataaaattttaaaatccactttacaggtggggaccccacaaccctggggacagcagacccttcgtaggccttcctacagatttattccataagggaccgatgactgaagccatagctacagctcctccgtgtaggcccagctgggggtggagtgagcctccgtccagccatagctggggctgtgggtcccatttccctctgggtcccctccgttttcctgtgctgtggtttcctccttttagctgtcatgtcccaaccttgatccccctggggcatctggtccacccctgcccatgaggcctatgtccatcccacaacttataatgctaacaagccgtttggggcctcccggtggtcagcaggcctgagccaggggtgacagcagggccctcagccacctggtcccttggcacggtctgtcagggcttcttgcctaatcaagggatgcattttaatttatgcaaatgggggagggatggtggcagggagtcacagacatccatcaccccatttcctagcagcagtcattcatcagtggggccttaaagataatacactttttgtttcaggcaattacttaatcttgacaaactcctgtgttaagcagggctattagcggggtccatcattaatcagcgcagaaccaagtgggtgctttttctgaactgcaatcactcttggggacccggggtgggccctttgccatcctcgccgccctaattacacaagcagcatgctaacaaccagcatcccacacgtgttgcaggggcgccaagccacgggcagaagaggggcccatttttaacgccagtcagaatgttttcggagccaggcagaatgatacatgggggttattagcagccaccaggaacacagctggggaaacagataactcccctcccctgggtccctcccggacttgcctctgacttcgctgggtacctgggcagcacttagatgccgctgcatggcagacccattctgttttaaggggttacatttccttttggaaagaccacgaatgaagtgaaaataccaaggctggccttgtgtttcctggagtttgttggtgctccacctccttaccagggcctgggtcacagagtactgctccctcctccatcacacacctgtgacccttattacaccaatgcctggcccaggctgccctgagggggagtgggcacccaggagaacaggggatgagtcgggcaaagactgggacctgggccttcccccggcctcatttcttcttcctggtccaagaagagctcataccgccctaccctaccccacccatgtctggaatttcagagaaatgggcatgaggtctggctgtgacacagattagccatttgactgaaccagggcaagttactgaacgctcctgtgcctcagtttcctcatctctaaagtggagataatagtaacaataccttcatcaattgctatgaggatgaaatgagttaacaaatgcaacatgctcaggaaggctccagtgtgaaggaagccctgtgcactggctgttagaaccactgcggtttccagtctccaaggaagggccagtgcgtggctgactcctagaaactgctctgtctcctactgcggccccgagcagcatggctttctctcctcggtcctaaattaatttagactgacagtcggtagctactggccacccttgttatcctcgggttctgttttccaatagtgggaggattcactcattcatgtattcattcattcactcactgggcacatactcctcacctcctccatgccactcgctgggctggtcgttgactcagaggaaatggtgtggagggagtatcgtctgcctgcggtggaggggggtggcagaagaaaggtccaggaagcttcctggaggcaggctcgtgtggactggggttgctgagggcaggctgagttggcatgatgaggatgagggggtgtggtggggaggggctttctaggcagggtggagcctaggaggcatggggtctgcaaggctgtcatttgaccctggggctgggagagtctgtggggcaggatctggaggtcctgagtgccaggctggggctcttgactccattctgctggcaatggcaggacctggggaccacctgtcagtcactcagaccctcctcctggtccccctactgaggtgtgactggacccacaaagcagggcctttgcccacaaacgcctcggatgagagtgcacaggccaggctgctcttgggtttgtggaagggcagctctggtttctccggccccgaaacacattgtatttgggagttttcccctagatcttaaaccctgtttatttaaaaagaagtagactctgtctgcttttaattcacatgcttagctcatcaaaatattgttttgcaagaggtttttttttttttttttgatgtcaggaaggctttggcatgttttcctcctccctttcttctacagtcttattctaggaaataagattctgggcaccgctcagggctggagggttgggtcatgagaccacatattctgtgtctcagtttctgaaccaacaaaataggggagcaggctcttcccacggattcatggactggcctccagtcctgctggtggacaccgtatcccagcaaagagaaatactgtttccatgcgccacagtggtcgttggtggggagagtggggagggtggtgggaatggcatgtgctccaaccatcattcagttaactgggtccagaatcacacgggcagggagccaggcgtccgaaagtgtaacacggcttgcccggtgtttctccacggtcctgccgcactgcccctcatgaccccggcatgggctttgctttctgcggaccctcttatttgtcgaagatctcgggagtccacacacccactcccgtgtctgggaacactccaagcttatcaagaacgcagcgggcagcaatccagggcagaacaagggaggtgctgtcgaccagctctgcgcggagaggtcaagggtgtggaagggtggggagagaggcacaggctgacttaatcccttgggcggggcaccggcctcacccacagaatcgcaagtaaccctcctacgattctgggaacgtttgtgagttaaatgaatggaagggagggaggaaaggagggaagaaaaataactgtgttttcatcagtaaatgtaagcgaccaaatagaagtctgtaggaagctaagattcaaaggtgaggaaggactgaggtttggggagaattctcatcaccatattttgtgtattgatgggacttttactaagctagactagaattctgaagcagtggaaagtcaataatgataacgagttaggcctgagctgttcagtagggtagccgcgagctgtgtgtggctgagtgcttgcaatgtggctatcctaattgagatgtgctgtgagtgcaagataggtaccaggttttgaagacgtagtaggaataaaagcatgtaacacatctcattaacaatttttttactggttccatgttgaagtgatagtatttttgacgtactggttcaattaaattgtgttattaaaataatcacctgtttctttttagttttttttaaatgtggctcctagaaaatttacaataacatatgtggcccacattgtatttctgttggccagggctgcattggatgagtggacacctagggaagattctagtccaaggtagagagaattgtaaaggatccctttgagtaacataattattgggactgacaagaggctcccagaaagtggcccttacgggacctgcttggatgaaagaatggagagcattttgtcattcccctgttgattgcagaaagacagtaagtccagccccagtgctcgtttgcttgtccaggtggctgattccgctgcccggttttaaaggtcattgattgtctgtggcaggccctgcctcagaatgcagcctggaataaagaggtgccttggctcagcctgggaaaccatcaccagggcctggtggagaccaaatgtggtggccttactgtcgtctcaagagctatggcagagtgcaaagctgggacttgatgctctcggcaggacgcaaggcaggacctataagccagatcaagaaacctcttgttgggctctgcagggaaggggctggatgctagttaagtacacagaatggcaagtgacaccttcacgacccgtggggaccagacagaggaatggcatggtcatcctcctgaaagggagaatcacctgcgacaagtgggcttcttgccggggaccagtcagcattgcaatagctagccgacaaggtccctgccagctgacggggtcgccagtgtatactgtcaaatgagtatgtcaaggggcagcaagattttaggggaaagcctgaatccatcccaggccacctggcctagccctggcctgtgacaggtggaaggagcactagggcctgggcaccgtctcctccagctcctgggctggattcctgctttctgcattggattctgcaaggtgccagggtccctgggagccatggtcctctgggcttcaaatctattgcattttgcagtggggaggctgcacactacttttttagaaaccttctgtgaccaagacagagttttcaaccttaagcaagcttgaccagccctattgtttcttccagccctaaaattctctaatgtgggactctacatgtctacccagacagacaggcagcccctcccattccttgtgatggcggggatctcccaggtgtccctctggagctcaccccagtctcccaccccttgctaaaggggcaggagcccagcagaggggtctgtagggatggccacaccggcacccttcggggccctactgcgtgcctggccctgcactagctcttctccacttcacagtctccctctgacatgggtcctgtccctatcctcattttacagataaggacaccgaggcacaggaaggttcggtgagtcagcaatcaagccagacttggctgtggcactggcggcagcctcagctctgtccaacaggacactatgccgcctcttgtggcctgtctcctgtcacttcaaggccactgttgcagggaacagatcccatgactgcctggctcccgagcggccagacccaaatggcacggggctggcctctcccgtggcgttggctggagcacactcctcaccctggaatgtgcaggtccctctgcatccctacctgccctcaccaggagaccagtctcagaactctgtgcctggtgtggagtggctgtgctggccccagcccagcacactctctctttcggcagctaatttgtcaagtaacacctcagcctggggtgggcagtgtgcgtgggcggacccagcagaggccacgggtcctgctaggctgtgtctgcagggcaggcctgattgcgtgagtggcctgggcctcagccagccggacaccagccagctcgtggtgttggaatttcctgtctgattttaattcctccccccacgtttttcccccaagtgagacagaagcactttttagttgcacgttgtggagtggccattcaggatattattcttattaaatgcttcctgtggggtggtggctgggcatcaggagggcctctggaattctcctgtcctgtggcttattattgaaaatcatggtgccatttgcataaggccctggggaaggaggttttccatgattcgtgctcttttggtgcttcctacctctgatgcttaggccagtgacttcgtcctcatttgcgaacgaacacctggtcacctgggctcacgtggctgaagggctggcctttgaaagtgtcaggatctcagaacagaccaaggctccctagcaaggggagaaagtccctggcagcctctcccagccctggtgtgcactttcattcatgtaccatcgaaaagcacagacccctggatgccttccaaacctgcattcccagtggcacccagaccccttgcagctgctgctcagaagcactggtaaatggtcaccaggattcaaatgtctcccccactcccgcctctctgatcttctgtgttgagtttctccagttagtacaatgcctagtaggcgcatggacatgataaatgatttccccttccttactgtgcaactgggaactatggagccacagcaagtgtggaaatgccaaagggcctgtgagtctccctcccggggtggtccctggagcagcagcatctgcatcactgggaacctgttagacatgcccaggctcactgaggcaggagctctggcaacagggcccagcaacagcctgagaaaccccgatatcagggcttagtgggtgcttcatcatgtacctcttactatgtgtattacatcatgtgttcctctcgaggacgccagcaagagatgttcctcatcctgtatgtataggagaggccacatgctttgcaccggggcttacacttcactcggttcagtgccagggcacaattgggcatcctgggctcactgtccgcactgccctgagcctgaagagcctgccatcctcccccttccttctggctctgccaggtctggcctcttccaatgagccttcctggctgctccagacctcatggaaatcttttcctgactttgaggccacttgggcagtttgtgctgcgtgggcctcgctgaatcccgcagggtcaggctctccagctgtggcagtggcttacacagcagcgccccggggcactccctgtgggcaggaattatgcctcttgttctctgtggcctccagagcccatgagcagcgtcctcttacattgagcgagtaggggaagccttgacctgcagcagggtgtgtggttgtgacttccaactgtggatggagaactctgccctgggtggtgagcagctccgccgtggattccagagacagctgtggagccaggcttgatggggcccaaagcctgtgtatgtcaaggccatattagtgggacaatgtgtctgaactacatcgtatccctagatcagacctggatggttgaaggagggagcatccagcctcttctttgaagctggtgtcgtcgtttctggtatcttctgggaagcctttaggtacaacttccctggggattgggcctgggatctccacaggaataggagagagcagagtcttgctccatgggatttgtgacaagcccagaataaatggccagaagcgaccttagccatgcaaacagcaagctgacatccagcatcattggtgttgggagggcgctggccttctggggttcatcaccagaatgacggtgctgatcgccatccttacccatgaggttaacatttttcatttcataaggtgtcttcacattcctgtttcatataggattaagtggtttaactgatcaaattgtacattaagcgtggaatggaaagtagcaatcactctcactttctttctctctgttgagactggggagtcattgacgaccatgtagccagtggtgcatctgttcttgtttgacaactcagacctggcccagggccccgagatggcacatgtgtgcattcaggccccactctgttctcctgagcctgtgcttcctggcagagcccagaagcagcctgaagatgcagtaccctgcccagccttgccctccttgcagctttgtccaggccatccatgcgccccctttcctggagggaagtagtactgggtttggtgtaaaataattgaattgtagaggagaccccatcctctgcactgctgctgccttgcagcacacaggaggagccttcatgagatgtcataggctgggacctggtcacatcccttctgccttgggcttctcctgctgctgactttcccaagaggggagttattgctgcagccatgggatatgtggctgatgcagacaaggagagtgggagccctccttttaaacggaattcacaatagtgttcacctgaactcccagaccaccttgcaagttccctcccctgcttattttctgcgggcagcatggacacagacactagggaaagaatggtgggaaccaccagagcttgtagtagccagcctaagcctcctggggattggtcatctgggaataggggtgagtggccagcagggattaatttatagaagatctttcctgcaaagccatggctttcatcagttcctgcatcctcactctgtcaagcagtgagtttgcacagagtacacatctgtgcatggagaactctgccctgggtggtgagcagctccgccgtggattccagagacagctgcagagctgggctgggtggagcccaaaccctgtgtatgtcaaggccatatgagtggggtgatgtgtctgaactacatcgtatccctagatcagacctggatggctgaaggagggagcatcggtggatgccttatatgagtttctatctgatacatctcaatgtcccttatactgggaatggaggaaaagttctcttcattaccatagcaccgggacccttgtcacatctgctcagagatggggaagggcattatgacttattaggggtttctactctatggacaccataaatattctttttttttttttttttttggatatggagcctctctctgtctcccaggctggagtgcattggcgcaatctcagctcactgcaacctccagctcccaggttcaagttattctcctgcctcagcctctccagtaactgggattacaggcttgcaccaccacccctggctaatttttgtatttttagtagagatggggtttcgccatgttggccaggatggtgtcaaactcctgacctcaggtgatccacccacctcggcctcccaaagagttgggattacaggcgtgagccactgcgcccagcccaccataaatattcttcacagcagttgggttgatgtcattcctattttacagatgatgaaactgaagcttggaacactcattacttgctagcgaatgacagagccgtggttcacactcaggtctgtctggattcatggctcaggtgcgttctgctcctatcccaagctccttagacaacagggacaggtgatgtcctgtaggactgtcctctggctgatgtgtgacactggagcaagctggacttcactctgactgcaaaggttaccttgacttccagcctgcccctctactgcttttttctttcttctacactagcgccttcttttgccaaagatattggtgtattttgtgcctaggtccttccattaggagaaaagcaaccagtaagccatctacactttggtgtgaatccattcccatgactcccaagttctgtttgcttctaagaaaataatactgtgctggatgttacttaatatgcaaggaattctaagttaaaggaacatgataaattagtttttaactggagaatcccaaagtcccccatagtgggaacaaaattggatgtcaaaaagcccttctccagtcatcccagagacgtgccaagtaagaatgcctccacttcagctgattggagtccactcctcacgtaagagtgcccgacccgacgcagagcaggcaccccaggagtgctttgtgtgcgagtgctggccagggtcccacacagaccaaagcctcctggcctgaaggctgggaaggtgcatgtgggcatcacagaggccacctgagtgtggcaggtggacagggcatggggacctatggtcctgacacggggcccacccggtgggtgcaacatggctgctccaaaggagtctctctccacgtggctccagcactgtcccctgggattcacacctgcagcatgggagccaatccctggaaccctccacagcaacactcagcatcaccgggcttccccatcctggccacagccaaggggctgagggccctggtgtttggaaccaaaggcctcatgcgcccttccttgatttctggtcatggatgcagctaccgcactggcctcctacatggtgaccctggagcggccaattgcccaagaaggatggggatccaggccccagccatgccactgccttccttcccgggcccacaagctgcactgagatgtgtttgcgctgcctcgtcgtaacacagacctgtatggtgcaaggctgggcctcaccttccctccatcagtgctggggcaactcgatttctctctgaaaccggtttcttctctggtccaggccggcctggtgcacagcgaccacatgcttccaagctaattccctcccgcagtcttgatggaagagaccatggtaactggagatggtgctaatctctaggactggacagcccagagggctggggcatccccaacacagccactctgtcctgggaggtggctgctttcacctccctggcctctctgccgtggaacaggccctcaggcttctctgggagcccagccacggggcagtgcctctgcgttgtggcaacacatgacttcatccgaggagaattcctccggctgctgatggaggccgcctggtcatgtttccatgacccagttttcccgattctttgtctgaactctgcagacccctacctccttctctcccccaggaatccacaggatcatttctaatggggcattaacttgagccaggtttccggggaagggctgtccttgccccctcactgccctcctcactaacacaagaagaccattacacccagtacactgcccacaccaatgtctgctcgccctgggaccgccagcaagaaacatttggtgttgaaactgcagcgtagaaaagttccaggattttaaagaaaaagccgtcactccgccgccaccctcagcttctcaggctgttgggctttctgtgtaggatcaaaaacaaatgtgcatttttttttccagaggggagtgatgatccattgaaaattcccatcttagagtttcttcctcagaaacttaaaaagagagtcatttctttgaaatggcatacggggtgtgtatgttttcagggggatggtgtgtctgtccctctgccggaaggacatgattaattttggattttttcttttacttgaaaaaaaaaaaaaaacacaaaagccaacaatgaaagctgtgtgtgtaagggtctggctcaggatgtcactcaaggcagcgcctattcttcccacgcatcttcatgctcctcgtgggcttctgcagcctctggatgcagcagtttcttgccagagttggaaagcagaatttttccctcctcagcctggccagggggctctgagcaaggcattcacctctgaatgtttccatcgggggctgtgggacaatccgtgctggtctgaaagagaccaccaatgagtcagggtcaacctttatccctcaggttacttgggaagaaaaggtggtctgtagagactgtgtgtgcacgtgtgtgcatgtgtgttggtggggggtgttggggtgctgtcctattatacctgggctcagaggattggggctggggctggggctggtgtgtcaagtgggttagaagggccgttgggtcagtcattatacatacagggccacaaagatgagccagcatctgcacccagagccctggtctgggcctgctcaggaggtccctcctgaagccttggggtgtcactggctggaataagcgaggccctttgcctgggaagtgggcaaccatttacagatagcaggaatgtgccagtaggaagggacctcatagctcctctaatccctgttgtacaaggagtgtgagacccagagaagggacataatttccccaaagtcccatggccacctagcggcagggccagtctgggattcctggcggatgggcaccactgccccacagcactggaccctccttgtacagcatttccaaaagttgtatcagagcaggtgactgcctgctcaggacttcccaggggcttcccagattgctcagaaaaaaatcccaaggttcttcccatggcctggctagtgtgataggaccttctctcctgcctttccacctccatccatccttctgtgcctggcaagttagccttcatgctgaaatcactgagttctcctgacacctggcctttgaatttgctattccttctgccccaagctccttctccaaagaggctgacttacctccgtgcctcatccatgtctcctctgttccctctcccaggtggatttcctccttagcttcatccccctctgacactatgttataaatatgtttgctgacttgtccaccacctgtctcctctcactgggccatggtgtgggctgccttgtcacaacactgttcccagggcctagaacagtgcctgccacatagcaaatgcttgatacaaggtagatgcatgcatgcataaataaatgagtgaatgaatatttctagatgacagctattcatacttcacaactgctgatgtgaatagatggggtcttctctctgagggtgagcggaagggtctgggcaggtccctggtcttactccttgcaacttggccgactagctggccttatacatccctgtccatcctggggcaaacactgtgctactgtattgggatagcagtgccagaggccctactcactgaaggcctgctgcatgctgggtgctgggctgagctgtgtggggaaaagactatgagaccaccagtcacttaccacccaatggatcattgctcttatggaagtagagtcccaccaccctgagccttgatgttctttcctgaaaaatgggaataagaacaaggttaatggtaaaactaaaggtgctgtcagcaaagccccatgaggcagcagaccttgctggagatgagcccccacaacagcaaccctagtgggcacattgccactctgccctggccaacctcacacatcaccgccaggacaggaggacccactaacacgtgttcccaggctcctcctggggattccagggggtgagagaggagtgcacgggtgcagcctgcacattccacaggtgacccaggctcctggagagcagcagagctggtaagaggtgccacctgcagccctgcctacctggagaaagagaaagtgcttctcctgtgacctccacagcctccaccccaggagctgccagacaacagacggcaggccccactatagcaggactctgtgggaaccctccccaggcctctttctggaagcctcaggcccctcctccaacacacaccacatgtacgtacacacagcaatacacacatatggcacacacacacacatatacacagcaacatacacaccatatgcacatacacacagcaacacacacatatggcacacatacacatacacagcaacatacacacaccacctccacatacacacagcaacacttatacacatacagcacacacgtacacatatacacagcaacacacacacacaacagcacacacatacacagcaacatacatgtacaacacacacatacacagcaatgcatatgtacacatacaacacacacatgcacataaacacggcagcagacacataccacacagcatatgcatatacacacagcaacacatgcatacaacatgcatgtacatatacacagcaacacacatgtatatacacacagcaacatgcacatacaacaacacacacatacagcatacatatgcacgtatacgcagtaacacacatgcacatataacatccatgcatatgcacacagcaacacacgcatacagcacacacatacacagcaacacatacatatacaacacacagcatatccacatacagcaacacacacaccacatgcacatacacagcaacgcacatacacatacaacacacatgcgcatatagcgatacacatacatataaagacacacacgtactacaacagagacacacacgacacactacacacatacacgcactgcacatactcacacatgcacgtgcagcacacacatatacataccccacacacgctacatgtagacacataccacacacatatgcaaacacacctcacacacacgtacatacacacacacacacaccatggcttagtcttgtggggcagagaggcagcctcagtggtacctgtacttcatgtttgcctggcaaaccactgaagctcacaatgttccatagactttatagacctgggtgaagttgcctgaatcctgaatcctgagcagagcatgtcagctcatagctgggggtagggtggggtggtctgggctctgatggcattaggagaccccccctcagcctctggaggagcaagaccatgaatggtaggcacaccagggtgctgggggatggcctgtgtgaagaccaaggaatcctggactgaatgcagcttcctggggtcgctgggaagacccaggagctggtatttgccaagtgctgaaagcagagctgtggactgtgtgtgcatttgttaactaaagtacatagcaaggtggggacgtggtgggtcgatgggggtctgggatcaccctggcacttgggagctgcctccgagtgtcatttaggctgggtggagggaaaagccattcagagccttcgattctcctcttggcactgtcgttttttagtcctgtgactttgggcaaggccatgaatcattcttggcttccgtttcctcatctctttaatgggcatagtaacactagttgcatcagggggcttctggatgtgcaaggaaacatttagaaatacacacacacacacacacacatacacacacaaccatttttattttgttggcaaaatactgaaatctggtctgccctgccatgtttttaaggcccttttctacacatttgggaaagcgaacactgtttccctgctgactccctggggatccagtggtctcttggtctgtgagcaagcagtgcttggccccccaccctccctagggtttgcaaccagtatgagccagttttcctgtgccccacattagtaaattcatagtttgatgatggactttggaggctccaaacatgagtgctacttgtcctcctcagcagtgacacttgttgagtgtgtcctatctgcacagtctccgggcgaagcgcctcctgtgtgtgggctttttacgtcttcaccacagccatgtaggtagttactgttatccattttcagatgaacaaatggagactcagagaggcaaagaaacttacaaaagtcatgcagcaggtgagtgagctctgaccctcagggttcccagcctccggagcacctggtggtcccgtcacagccaccttagtcacagccacatgcccggctcacctgtgcagggccagggcctcagagaaaaggttgtccttccagcacttggtggctctggaagtgagagctggcccagaggcttggaccacgtgcctgcaaccaactcctctttgagtctgagttggggaaactgattgaatcagggtgagaagatttgctttttgtttttcctggtccccatggaaagtgccagtattgtgaaattatgaagatggagttgaacatgtaaaaattaaagttaaaatttcaggagaaaaatttcttcccattaagaatccattgtgttcaacccaagcatccattgacagatgagtggacaaaaaaaatgtggtctatccaatacaatagattgttattcagccttaaaaaggaaggagattctggcacaggctgtaacatggatgaaccttgaggacattatgcgaagtgaaataagccagtctcaaaaggacaaatactgtctgatctttcctgcatggaatagctagcatgggaaattcatagaggcaggaggtagaatggtgaatgtgcaggggctgggggagagtaatgggagttagtgtttcgtgggtgcagagtttcagttgtggagatggatggtggtgatgattacacaacaatgcaaaggggcttaatgccactcaactgtgcatgtaaaaaaatggtttaaatgggccgggcgtggtggctcacgcctgtaatcccagcactttgggaggccgaggcgggcggatcacaaggtcaggagattgagaccatcctggctaacacggtgaaacctcgtctctactaaaaatacaaaaaaattagccgggcgtggtgtcgggcacctgtggtcccagctactcgggaggctgaggcaggagaatggtgtgaacccaggaggcggagcttgcagtgagccgagatcgctccactgcactccagcctgggtgacagagcgagactccgtctcaaaaaaaaaaaaaaaaaaaaaaaaaaagatttaaatggtaaatttcagatgtctttactgcaagaaaaaaaaaaagaattcatagtatttatggtattgtaccagaatctgtttgcacagaaacagttagtagcattatttttctatatttttttgtttgtctgtttcttttttggttttttgaggtgaagtttcgctctttgcctgtaatcccagcactttgggaggccgaggcagatggaggtcaggagttcgagagcaacctggccaacatgatgaaaccccatctctcctaaaaatttgtctgcatttcttagcctagcagtcagctgacctgtacatacctatcacaaacccatccacatttctttaaaatattcagaaatccaaacttaaccctgcttcccactggcctgtggccttcagactgagggagagttgactaagaaatccccacttcttagcccttttcccagtataactactttgttaaaagccttcttttcctaaagcctataattatgtttgcctccagggtacccaggaattttttcttttaataaacaaagagcatcctacaattatcatgatgatttgtcgagggcaggccaagttcagacaggaggctgactcagctctggaaactgacacgcacgtgctggcgttttcgatcctgggggcacccgacagcgtttaggggtcaagaattaatattaagagctggagaactaacagatccacatagatgtccactttatactgccagcaaaacgggacagcagttgggtgggatttggccttcctgaggctggcggcaccgtctgtgggccgtgccatcacaaatggctctaggtcaacacctccagcctgcgtgcactgcagcatccggatgccgtaacctggtgctgctggagccacacgcagccagggccggcatgggcagaagccggcggagttggagcctgtcgctctgtcagccctgatttgcgggctgagcccagttttgtggccctgcctgtaatctccccgagttcaaagagtgcttagctgcttgtctttgtcaagagcgcagttggggatcttttatgtgaaagatgtagaattctcgggcagactttgattatttattcatcccccttcgtgggtgtgtgatcgcgcgggcactgcggagccccttgtcctggctgctcttgctatgaaattcattgagctttaaagccctttgaaagtagctttttgagggagggggaaagtttttgaagtcttgtttctctctccccctctgcagtgccgcagcatctcttgccaccattccatgcgcccctaccgattgacatgcgacaccaggaaggaaggtaccattacgagcctcattctgtccacggtgtgcacgggtaagtcctgccctctgcctgctgctcctggcgtgcagtcacctgccatggggaggctgggccggcagcctcagccacatctcctgcctctgtctttcttttgggggttcctgatctacattgtcctgagcgggcgatcacctttgctatcatggcctgggaccctgtgtgagcatgtgcgtgggcagtgtataaacaccaaccacccccgagcccacatcaccacttataaggctctgggcttccttggtgtatctatacatggtttggagctctttcttcatccatgaagtgggaatcctctctaggtctaagatcccatataagtaaggtgatcttaggtatctgttgttccagcataataattcagagcaccctttttcacttcttcaagtgtccccctttgaatagtaaattgtatagtcaccatacttaaaaggacaagctcaaagtgatgctttggggcccttcctattcccagctttgaagtccccaggtagaaggtgtggggtcaccctgtggtctccacctgcctaaccctgtccctgtcatacccacctggggcctctaagcccattggctggtgtcatttcttggcctttagggctcaaaagtcttggtctctggctatcccatccgtcctccttccaggaaagaaggcccctccttctccctacccccaaactctccactgctccccgcacctgcctccaggagagctcttacaaaggtcagccagccccaagacccctctcgacccagcatcttcatgcccacaccctccagccccctcacctgttcatgccaaggtgctgtctgtggttctgtcccatgtctctgtgcctggggccagctgcctgcccagtgtgcctggaatctccccccaacaggccacctccaagcctcaaccgaggagtcacctcctcaggggcagtgtgatccttcacactgagcgggggctgctgccctcaatccacagcatcatcatctgtttttgcacctgcctcccagccagctctgagctctcctctcacctctgtgtctcaatgctgacatgaataggtgtacaaccagtgctcgctgagtggagagcctctccccgcctgccgccacctatgaaggcacatcctccttcctctaccatctcccatcccagtgaagtcagtcaacacttgctgggccctcactgtgctcacagcattgtgcctcagcagagtcctgtttccggacacccattgcctccccaagacggagcaaacctgggacttctactttctttttaaaaactgttttacttttaaatattttactctgaaataattaaggtcatacaaaaacagttccaaaaaccataaaggctttcttgtatatgcttcacgcagctcctcaaatgtgggcatcttacataacccaagactgacagaatgctcttcactcacccacagagcttatccagatttgctcagttgcccactagtgtctttttttcctggttcaagacccaatcctggatcccacgtggcacttggttgccgagactccttcgtcatctcctgtctgggacggttccttagtctcttttgtctttcatgaccttggcagttttaaagagtactggccagttactatataagatgtctctgggtttgggtttgcctgattgatgctgtttcatgatgacattcggatcatgcgttttggggaataatactataaaagtgatgtttgtcctttgcaggcatcctgtcaggaggcctatgatcttcacgcttctcactgctggaaatgttgatcatttggttatgggcctgtctgctggcttctccgctttaaagttgtcccgttcgtaattaataagtattttgtggggtaatacttagaggatatggaaatatcctgtttcttatcatattttcatccgttaacttatacatccatcgatgcttcttgccagaaacagtcgttactagtgtttgccaaatggcgattttctgtttctatcattttgtccacatttagtggttggaattctcctgtaaggaaaagctgtcccgcctcccacatttctttgtatatttggttgtctattgttatgcacatggatgcatggttttttgtgtgattctatgggttatactctattactaccaatatttattgtgttcttccagttgtcccagatttggccgttggggtcccttccagttgtcctctgtgtcccgttgacatgttgggaactttttgttttatttcggtgtgcatacctggttctcacttgactaggatccgctgccgcagccttatgtctgcctggtgggtgttggagtcatttccaccctctgctcacctccagggcccctccacctgcaggtggctgagaccacagctggagaaacctctggaaggtgcatgtgtttggaactagttgggccacccaaaaattgcccagtcagtggtgtctgagactcctaggagcatccagggagctcagtccctatttgggagggggttgctgttgctgatttcttgctcatgagtcatgtttggctggttccatgacacggatcctgggcatagcaggcctgcctcaaagtgctccctgcacgggatgttggtcaggagacctgggcaatgctgagagctttgtgcagagacagtccatgctggagtgcttctgcctgcaggtgaatgtcctggttcacctctccctatacacctgaagtgtgtagaggcaccaccagaagtgtaggaagaccccaacagcgatgactgccttcctcatcataactgaccttgtgaaccggccctgctgtaaatgcttttatgtgttcatgccgtttaatcttctcaacaacccaaaaaagagtcattttgtgtttttccattttacaaatgaaggaactgaagcagcacagagtgggtagatgactaaccctatggctcacccactttgcaagttagaaatcaagttccagccccctgagctcaggccctccgctgcatgctggcctttcttgtgggagcgtaagtatggaccatgggtccctctgacgagtccagccgagcccttcttgacagcacctcggcccttcgttagggcactgccccgagtccagtcgctcccagaacccctggccaagcagcagcagtgtcccctgggagtctgttgtgggtactgcagatcctcaggccacagcccagccccattgagtcagagactccacggaaggggtctgtgtctatgtgtgccacgccttgcaggtaatgcagttgcaggctccagcttgacagccctggctacaggcagagcccccactgagaagggaggccctcagtgccgtccttccctgtgtaggtgggagccctgggctgggaaggggcctgggtcttcaccaggctttgccatgctccagctctgggtagggcctgcttccttcccttgccagtgagggtggggtgtgcgcagagcacttggagaagggggccgtggatgctggcatgcagcagggaggagtggcccagccagaggcccacagaaatggccttgtccctcatggcctacacagctccttcactggttggattcctgaagagattcctaaggctgctgtaactaattaccacaaacttcatggcttaaaacaatgtaaacttatcctcatatcattccggaggtcagaagtctgaaataagtcttatggtacttaaaatcaaggagttggcagggctggttccttctggaggctccaggagagactctttgacatttctaggttctggaggttgcctgcattccttggcttacagccccgtcctcacacacatcaccttttcccccttgctctgtcctcaccttgccctcttcctagtctgtgggagttttctcccctgcttctctcttctaaggacacctgctattgcctttcgggcctactgggataatccacttgtggctcccatttcaagatctttaaagtagtcatgtctcttaagtcccgtttgctgtagaaggaaacacttaacaaatgccagggattagggtgtggatgttcttgggggctgttattcaggttatttgggatcactgagccccagtgtggagtctggcatcagcctgtagaatacagtaaatcatatttataatttgcatgggtctgcagcaggccaggcacggccctgggccctggtatattgtactggtgaatcttcctgattgctctgtgagatgggggttaagcttcatcttgcagatgcagacattgaggctcagagaggcacagtgacttctgtgtgacatccctgcaaggtagttacttccgtgagggcaaggagaccaggctctggggtgcagatctcctccccagccaaggaggggctagtctggttaagccccagtgatgggcagcagcatggtgctcccagagccccccgtccctacgcggtcctgctggggtgggcttccagcggctccacactatcctcaagacagttggttcccgccagactgagtgggggacacagcaagagcctcggggctggccctgggctctggaaagcccatgccctcacctcttccgcccccagtgtcccaggtgagaaccagggcaaagcttgtgaggaaaatggccccgtggctctggcttccatgatgaatgtggttggagcccggtggagaatcccgatccatcaagcccatgttgtagctcgcttctccctgccagcaccaaatgtgtctaattacacagatgtttgcacagcaaatgaggtacggtgtcatctcatttctgtgtcagctgagcctgagcctgagcctgctgccctgagctggtgaccatttcgtgggtgtgcccgcccctcagcccttgcacctcctgctttccactgctcaagcacccagaccccctccccgttccctctcaggatcctgatagctccagggagggcgcacccagtgtgtgcaggctccagagaggtgttccctgcactctctcattctgccctgccctctgcccctccggagtaccttggtcatcacccaagagcctgccattgtcagttctcagcctgccaggctacccgcactgggacccattgccgaaccctccctagctgtgattaacatgaattaactcacctcagctttctcatctatagaagggccagatctgctgagacaacccacataacccagccaactgagttattttgagaaggagacagggtaatgtgagtaaagcgtctagaacactttggaaacattcaatggatatgagcaacaatcgtgatcattgttgttatcctcacttgctgatttgagaagggggccacggcaggctgggagactgggtggcagaggccggccacagcatgtccttgggagagttgactgtctggggactgtggcacagaaggtgggggatggggctgaaggagtgctgtggtgcggtgtggtgggggtctttctttcccccagttgaggaatttggacttcctccttttggcaaccaggagcagcggggagtggtcagatttattttcaggcagctacagcagtagttagggagtagacaggagaagggcgggaactgtggtgagaggacctgccagagctgccacagtggccctggggagaggggagcaggaccagggctgaccacccggctgtaaacaggcagctgcacgtggggaaggcagggcatggaggttggtgtgaggacagccttgcagcccagcccagctcgatggcctcctcatagacacccaagcccactcctctgcagagcacccttcccggtcacttaaggttcaaatgcacagcaggcttgcatggcttactgatgctcacgtggttccaggggaggaaagtcaccacccacccgtggactcctgctgcagtgtctttgggctgtgcaaaccacaagtgatggggagacaaatggggcaggggtgtgtgattgctggtcaagcaaggttctcttgaagcccccatggggacatccctaagtctccaagagtctgtacaagggcgagaagagaaggccggctgtgaatagggccacacacccccagcagtctctccaaccttgtgacgctaacaggaaagagaagctctttggatgccctctgggccccctgcctcccagaaataggcttgccagggtgtcatggggagcaaggctgaggtgtggcgaggaagggtccctaagttggtgctccccatttcctcagtgtatgtggtcacacaagcatgagtccggcctgccctgggccagcgttaacttgtgtcctggagaggaatgtagaagtccatgctcctggttcggggggctggggtggaccttcagctccctatgttgcttttgaggacctttccagccctgccctgccctgccctgccctgccctgccctgccctgccctgccctggggcttcagagaagaccaatttcagctgcttcctgcccagaagggcgtacagaaactgccccatgcagaggttcccaaacctggctgcagatctgaacacacagggtgggtcttaaagatgcccattctcaggccctggccccaggagttcttgttgattttcagactagggtgaagcccggaaatctgcttatttacaggcgcccataggccagagtttggggaccactgcaggcgccgctgcttgcttgacgtccgggaaagcagccccagagctgcttgttggctttctggactcatcactgacagcgcctcgccgccaaaacacgggttgttaaaaatcccctggttcctcgtgataacccattcacagacaagtccctcctaaacctattcatatgacctaaacctattcatattctcagcttgcaaaaggcagtgagtgtatggggtgggaacagctgcagtatctcagccttcctttctcctcctgcctggcaccatctgacctctgacatccacgactccacccccgacctgaccactgctgatggcttcctgcagatctcttgatcctgagctgtagttggtttgcattgcattggcagtcacggcccaaggccacccttcctggaggagtgacgagggggctcttgctggcacagatggctcagggttgtagctatcaacccaggcccaggtatgttagggcaatagagtgaacgccagctggtgggcatgggggcctcacctccctttcatctgcatgcttggtcacgcaaaatgcatattacccagggcctccggagacagcattaagagtgtctgaagccccacttggtccccgagactgcatgttaatggggatgtttagccgggtgtcggtgtgccttcacttaagagagtagtttctttgctgccactgggccgaactcatgaactttccagtctggggggatttgaagattgctttttccaaggtcagtgtcccataaagactgcaccgttcaccatgagattaatgaacacagcagcctgctcagcctgtgactcaccagtgtcatcccgggcctttatgactctgtcctcagtcattcactgagacgggtgggttgagcagaaagatattttcttcttgattcttggcacagcacccgaggttcacgattcatagaggattggctttgtttgttttttgggaagaaccttctcctccctctgcaaacatgctcgtttcttttcagagcctagaggaaggaggagacttccgaaaggcatgtccacctgccccctgggatgagatgctgggtgggcccagcgtcacccaccaggcaacttgtccttcctttccacgtgggtccacactgcctctccatctccagggagctcttccttaaaaccggctgttgctgaccacttcttcagagcaactggacagcaggtagacagggagcccagaaaccctgggtccaggcgatgtgtcgggcagcacatccttccacggctgtctgagggtagaccgactagatgtggagccttggctcactgtgatgtaaacggccctgagaccccatcaggcaggcccctccccatctctgggctgtgggatacttgggtcagaccagcagaggagcagtagcaggagtctgtgcccagccgccggcttatgtcatgtcaccctccctgcaaggtgggattatcactccccaataatcactcccacttgataattggggaaaccgaggcatggggaggctgactgcctttccagtgacacactcctagtaagcagcatagattacttactgggcattttgaccccccaccccttgctaaaatcttccccagctctgagagcttcagattccaaagccaagaatgcactcgctgggctgcgtgggacagacagctcatttataatggaatctggcctgtaaaagtttaacgaggagcgtgtgtgataagacgggctggtctttgatctttactgaacgccaaagccctcgcacaagaggagctgctggctctgggttttggagagagccgtggtggtcagccgagagcaggaggggccagggagtggagcaaatcttgatgtgcaggccgaggtgggcgtgcagtgggggaggggctgcggcaggatcgggatgaactattcggttcctctcctgtccctcggggtccccactgtcggacatttcccctccacacccccagtatgtagacagaacagggttgaggccggggctcacatcttgcctatgctgcttatactcttcacatccttgggcttgcttagccccacaagcctcagtggccccatctctaaaatggggacatagtggctccccatgtgaaactgttgtgaggactagatgggtgtctgtaaagcatgtagaagcacacctgggacataccgagtggcggagagacccctgctctcatcactgccctgctaacattagaaggaaagccaagtttcactgcagacaccctgcagggtgctgggccagtggtgtcctattcagtcctcccaacaccctgtaaggtgggggattttctcctcaattcatagaggcgagaactgggcgttcccagaatttaagaacttcccaagattgcccagcttgtgagatctcaccaagccagagctcttccctatgccgtgattgtcctcagagaggaaagagagtctcgccatggttctcagggctgcagtgtgttgtttctgtctgcagacatggaaacagaacagtaatcaacccaaaggaattaatcactaacagtaaagtttcaggcattggtggggtggattggcctttgaggtggggagtcctcttagactgcacatgttcagactgtccactcggtggaagctgacgccactgccagatgcattcatttattcagccaaactcattgttgctggatttattgtatcccaagtgctgtcacttgaggccactcctgccagcccgagtcaaggtgttgctgagggaaaatgtgagcagtgccctgcccctgaggcactgcttaaaaaggtcagaaattgctgctgccctcaagcctctgtcactgcagccagcactgatggtatgtctggtgcccgtcaaaaagtacgctggacatgtcaggagccccatccctccatcccctccttccaaggactgcacctctgaaatgtacacttggcctgtgctgcccaaacaaagtagcaagagttcagagttgcttaactcagtggggaatgttcttaatgctcgttcctctgaggacactcacccagggaccatgtgtgccagcctcatgccaggcactggggatacgggcccaaggaggcacagtcttttttaatagaatttttatttgtataaatttatggggtgcaagtccaattttgtgacatgcatagattttgtagcagtgaagtcaggacttttagagtatctatcacctgaatagtgtgcattgcacccactaatttctcaaactacatgccccttctacctccaggaggcacagtcttgctgcccacatagaccccatgatctggttggggagagggcagaaattggccaatgacagggtggtatgctggaagagggggtatgggaagcccagagcaccaggaatacaggaacagaaagcgcttatcagcggggacgcatgaaggcctccccccacgtcccagcctttccccaaccccacccactgggggccctaccaccttcttcaggttgccctgttccaatgaggggcctccacttccaggcagacaccagtgccactaaggaggggaatcttttcaaagcacatactcatgaaggcttggtaaaaatcagcagcacacccacctcgaagaagagatatatgtgagctgctcaggattctccagctagttttgacaggcatccaggaaaggaaattccacacaccactttggcaggctgggccagagtttaagaatctcactgtggaggagtttctatccagcccgccggccacccaggccctttctcatcactaaaacccaggcctccagtgaaatataatgaaatctctcccactaacgaaggccgctccccacaaaccccactcccaagactgcacatcttatctcctatttccttattcccgcccatggctttaaacccttgactttctggaagatttggttcagcagtgctcagcccatggcagcttctattacagacaaagtccccctgtactcggaggtcagtggtgcagttcacctggagagggcctaagcaggaccgactcccccagggcctcctccccggacccagacacattcctggttccactgcacagaaggagtaaacccaaggcttccaacaggccccacacctcactcctcccctccctaccctgctccaccaatgtcttcactttgctaggaaaaacgtctccctgataatccccttatcttttatgctttttgggttttctgtttgcaaaaactgataaccttcttattctgctcccaggggaaaactgataaagggtgagtgcatgaatcaactgttgtggaccacgtggctagattgcaaccaagtccatctgtattgcctcctttgtaggcacaattttataacttaatttccctaccaaaacatcagtgtttacttagtaagaaatctgctctttgtcaactgaaaacggtgatttctttattacagctctgcatagggagtgacagctgaaagctggccaggtctggtgtggtgtccgggtctttgatgggaacggggtgagtgcaggtcgcatatatgggatgcgtgtttgctgcagacggggctagggctggcctggagggagcctggacaacagatagatgttgtggccaagagggcccatggagtgatcatgtagacgactgagcctcagatgatttccagcagtcacacacattcaccaccaccaccagccctgagttccccaccagcgccagccctgtagccgtcctgctcccggaatccctatccactcagccaacttaaaccagagactacttctacccagccatccttttaaaaaaaaaattggtcttattgattattgaaaacatgcaaaagaacaacaaaagtggccaggtgtggtggcttacgcctataatcccagcactttgggaggccgaggcagggggatcacctgaggtcggaagttcgagaccagcctggccaacatggcgaaaccccgtctctactaaaaatacaaaaattagccaggcgtggtggtgggcacctgtaatcccagctactggggaggctgaggcagaagaatcacttgaacctaggaggcggaagttgcagtgagctgagatggcgccattgcactccagcctgggcaagagcgaaactccatctcagaaaaaaaaaaagaacaacaaaagcatgtttaagatatctgagtaattatgacatatacacccttatcccctgctcactctaaggactgaggacatgccagcacctttgaggtcccgtgtgctccccaatctcctgcctcaggtcctccccatcccaccattctttgggattcagagtttatcacccctcacatcttatgacggttttaccttgtgtctgactcccctaacaatgtattaattcgttttgctttgtcatgctttatatacatggaatcattgcagaggtattcttcgggaacttgctttcatactccacgttcttccgaagattttcctgctaatgtgtagggctcttcattcatttgggctgctccgaagcagtctatgttgactggcatttgggatgtgtctgtttttgctaatttgaacatgactgcagaaacacttttataccatcctctgggccccaagtgcggggttatttaaggtaaatgcatgtctgggaatggaaatgctgagtcacagtggattcatgttctcaccctcctagacattgccagacttcgcccgctggttttgctaacactcactcccaccagcagagtttgagagctggccttgccctgtatccttgtgatatccttgccccatcactttggaggtgatggcctctacattttaatttttgccaaaatggctcttttctgtgattctaattttctgtttcccttattgctaatgaaccttgagtgttctttcacatgcttatgggccactaatgtttccttcttgggaaatgtctgttgggctattttgcccatttttctatgaggtcgtctttttcccattatttgaataagtattttgcacactaaggttactcattatgtggttagcaacatgtgttgtgaatatcctctcccagttcgtgcctggtctcttcactgccttgatggcaggtttgggtgaagagaagttcccattgtaaaatagctcaggtaggttaccgacatttctactatgtttttccctgcatgttctcctcccacccagatgtctggtcagaccttcagcctctggactatagtggttgttccccaatacaacatgtccttattcagctattctcccatctcagaacaccaggcctatactactcaccacctccattccattctcttataagagtctgggcacagttcagatgccacctcctgcaggaagccctctcagattgcaccaacagagtgggtgaattattttcctcccacccctcttcctgctccagcaccttgtatactgttagaaggctatagtcagtgtccattctctctctgtgaccccagaggtcctggcatggtgattcggccaaagcaccagtgtgaactatgggattgagggcctgtgatttcctgagctcgtaactggtcttgggaatgcctgccaagcagcagcaccctgtcttaccatcaccatggcttcatgggcactcagggggtctgctgagatctgtgcacttgtggattcagagtagaccttgggaatgtggggcatagcacttgtcagtcaggtttgcagccacctgccccctcactacctgggtgcatgcggggccctggccgggtctgtctcagaaccccagctccccacacctgctccctcactacctgggtgcatgtggggccctggccaagtcggcctcagacccccagctccccaccatcagtgccatcagaggcccatgctcagtaaacatcagctgatccgggggagtgacgtgtggacgcagacacagatcagcaatgaatgtctgcaaactgcggcctcagctcccgtacacagagcctccccatgaggacagactgccaccagacacacaggagagtgcagattgataaaagacatggactgcgcttcagtttgaggaagggacagttctccattgttttccaaaagaatttgctgtatggctcttaaaaaatgcaaatccccttagtacattttggaaaggacttgatttctagaactttttaaaacaaatgtatgggaaacatggtaagcaagcttgccagtgtacagtttcacctacaaaaccaaacaacaaaactcaaaccaacaaacgaaaaccctggggaggagattgaattccatccagaggagcgttctggagctctgtttctatttgtcggtagagccgagggtggcaggagctggccttgctctccagggaggccctgggagagcagacacatgcacgccctgtcctggcagtaagaagttccagtttggggaggaagagatgcagggcaagctttggggactccagcttcctttccagcaggtcagtgggcccagaggacgcctgcccagcatttctgaggaagtgggcacctggtcctgagcagctccgcaacagcaaaaaggtcccagtgtctccactctggagctccgtggacccacccatggccctgtgatcctggtgggtggtaggcatcttggcccaaaggcagggctggtgtacacaagccagcggttccgaggcaggaggaaatggcatgctggggctgtgtgctgggtggattctggctatggggagtcagtgaccatgaaatccaggcggcaggggggaaagcccgctccacagccctgtgcacatggggatgggaacgcaggactcagacaccttcctccacccagcacaggagttcccctaccctgccagcctgcctcaaagggagcatctactggaacctggttattccgagcaataaataggagccctgctaagagtttagtctcagaagaacgatggcactagtgacggtgatgtctgccacctccctagggccaactctaggccaatgcaacatgctttccatgacgagttcatttcctggggctgctgtaacacggtaccacgaactcagtggcttcaaacaatagaaatatgttctctcggtttcagaggtcagaagtccaaaatcagtatcactggaacaagatcgaggtgtcaccagggctgtgcaccctcagagacccccaggggagactctgtccttgcctttcccagcttctggtgctgccaactttccttggctcctggccatttccctgtagtctctgtctccctgtcgcatggccatctcatcttctgtgtctcagatcttactctgctgtctaaagaccccatgatggcatgtagggcccactcaggtaacccataatctcctcatctccaaatccttgtcttaatcacatctgtcaaatcccttttcccagtaagttcttgttcacaggttccggggatagaacatggacatatctctgggagatctcatgagccccccacgtgccttccctctgctcctcacaacagatttgtaagatcactgtcgtaactgttcagagacggcacatacgtgctcccaggcaggagtgagctgaggtgagccgggacccatgtcttctgcagtagtgtctgtgctcttccctggacacgctccctgctttattcattcattcattcactcattcgttcacgccctcactcattcattcattcattcgttcacgccctctttcattcattcattcattcattcattcactcattcgttcacaccctcactcactcattcattcattcgttcacaccctcactcactcattcattcattcgttcacgccctcactcactcattcattcattcattcattcagcacacacgtatttgagcatgctgtatgtccctggcatgtgcggagccaggtgcagggccagcgtatgaacagaaacggatacaggagacaggaggcctgtgagctcacagctgaggatatctggtcatcagctgagatggacgtgctcaggtcagaggaaggagccacctaacacagaagcaccgtaggaggatcctgaccttgacctggggctagggggcaccttgggtgagaggtccctgagctggcacctctgggaggagaacaggagttaactgggggaagggatgaagaggggaagggcatgactggaggtgcagacatcaaagggcaaagctgtgagaggcaagcatggccaaggaccagagagtggcatacaggacacagaggggagaggcaggccctggccacatgggattgtggcccctcgcctgctgccactgaggtcataagtcaccctgagaagcaggcaggtggtgagatttgtaggctcatatccccaagtgactgggcctccttttctcttcatcagcaacagctgttggaccagtctgggggcatccgggtgcctgtgttcccacccgctgctgccgctggcctcactgtggccatgcccctggtgctttgggactcagcagtgctgtctgttaaatgggacatgaaggagctgttcctgcctgtgtctggccccagccaccagcacagatcttggagcaaagccatctctggcatgccaagggtgggcttctcctctgactccaacccccgagtgggacagcccgccctgatggctggtgctgagtctgggtgagtcagcagccctcagctccacattgttcagcttctccaagcaggcaccgaggctggggtgtgggggccccaatccctgcacttccttccctttctctcacaccttaaggaacatgccggttcttgcccccacaccttggctcaggcggtgctcaggccagatgccctcctttctcctccccagccctcaaagtcttacttgtttctcaggcagaagctacacaccgtccaggtacacatcccccatcattctcactcccagggacagcacccactccgagggtctggcatgctcgcttaggcccagccagctgcatgctgagttacacatggctgtgcagagtgctcattaccttgaccttttatctcccaccaaaaatctcatggcagcagatggggaagggtcctgggatttgatgccgaaaggtgtggcctgggtctgctgcactctctgagctgcttccatttgctcatctgctagatgagcggggtgagcactaattgagcacctactaagtgcctggtgctacactgcatgctttccatgcttggctcatcctacctcacagctgccccacctgcaggcaagggatcctgaggctcagggcacatagcactgaggctgcaacagcaccaaagccatgattcagacctagatctgtgacttcagagtccagattctgcttatcagtgggggtggccccctcagtctgcactgccccagagtcaccttggggatcagctgaaattaggcctgccaggggaccaccaagccaaccttctcgagaactgagacagcgagggtggagccagcacgagcctgcatctgggtggaccattagacatgtcagtgcccaatccaacttcacaggggcagagaggctggccttctactcccactcggccacctccagctctgcaaccgtgggcaagtcacatgacttccttgagtctcagtttcctggtctgtaaaatggagataatgaaatctgccttgcaggcttgctggatgtattgcacgtagtaggcgttctgcaaatgctgacgactttgtcagcagcagcagcatccctgtggcagcagccacagagttaacacagcagccatgcagtgacacctcagtttactttatccattctcccttttcccctcttccttacttccattctttcttacttcccctaaccaccatgctgacccttgggcctggtcctgaaatcccatccaagggctttgccagggatctcccactagggagggagggaaagagggaagaggaaggatcctgctaaggagaggcctttcctggcactgcctgcagcctcctggggcaaggacccaatcacagtcagcaggccagaaccaacatcgggaagaagcataggcgtcctccactgcagcggagtcagccgtgaggccgggctcctgctccttgttgctgctgccgctggtcgctaacatgtgcacagcacacacacacacaaacacacacacacgaggaaaaggggctttggttggttgtcctacttacccagagtcccctgcttgtgcctcatgcccagacacagaaggacatgcccagctgcaccctccagcctcggccactgtgggcaggatgtccagggaccctctcctgttctgcaggtgggtggatggacaggcccgagcacttatggctggggtctgccttgcagggtgccaggcccaggatcattctgggcagtgggaagctgtgtgggtcaagaaatgtcttagctcacataactgagaaggccaaggatactagctttagacagagggactcaagtcaagaaactggctcatcctctctcagctctgatgttctctgtatcatcttccttcttgggctctcccctgcatggcctccagcagccccacgcttgcaccctacgagctcagcaacccttgcggacagagagaaccaaagactctagccaaagctgctgtgttgggcacatgcctatctttgaaccgatcacagtactagcaatatggaatacattgatcacctgggctcaggtcatgtgtcccctgcccagagcagcagaaaggaagtgggttcaatatagacccagcccaaagcactctgtgggctgtgccctgcccctcaggcataaccttctcacacacacacacacacacacacacacacacacagctttgtgctccagcctttctttgcacacactgcttcctttgttggtaatgcactacctcgtgaactcctattcatccctcaagacccagccctaatgtcaccttctctgagaagccttcctgcacacttccaggcagagttagagaatcactcctctgctggagcccttatcatactgcctggtaattacctgatttcatgggtctgcctctttccccctgggctctgagctgcctacaggtccctaggcacagccctgttgggagcgtgaagaaatgtaagaaggaacaactggtcagatcaggctcagacgagctctgagctggactgaggggagaaggcaatgcataggggcagtgtactgagctgagcggcctgcagaagggctggctgtgccactggttgattgtgccatgggagtgtgtgagggtgtgcacatgtgtatctgtgatgtaggagactgtgaccatcttttaaattgagctcatgcagccagctcctcctcccatcctgaagggcgtctctttgagtctctgcctagctgtcggaattcaaggactggatggccgtggctcacaccaaggccgggcccctgcagtacagcagtgtggaaatggaagaagaaagggaggttgctgctggggtcagcctgaagtggtggttcagacttcaccagtagtcgcctttcctggtgaagtctccatggctcaatcgtctgctcactggcgctggcaacactgaggtatcatgagaccctcagctggggcctgggatgggggcaagtgtccaagaaagaggggcactggaccctgaaggacctgctgtgtggtttggcaatgctggcgtgtttcagggctgctgggaagcgccctcaggccccacatgcctgtgtgatgctggcagttctgccagctctggcccattcctctggctgtgtttagtctgtcaaaatgaccatctctgggaacatgtgtgcccctggatccttagcggtcatcacaacatagtggggttggggggttccagctccctacccagagtagggtgggattgtatgtgatgacctggtaggggtggggtggggaccagagacagagaagaagctgaaacggtggggagaaagctctcctgccctcaggtactgccccctcccttatcctgtccacaccctgagccctgcttaccaccaaccagtgtcatcaagaacgcccacttccctgccagggcacaggcaggggctccagcccagccccacctgggttggttgtggttctaccacctgctatctgggcacccttggccaagggacctagcctatctggggatgttcccatccacaagatgggcataaagtgcctgtgttgtgaatgttttatttgaattcacaaagaaaatatgtgcatgtgccccaccgatggctggcacacagtcagccctaccctggggagataccaggtaagagcacggctgtgatctcactggccctgtgcaaaagagacatctcggaaggcttcctggaggaagtgtctagacagtcattgatggctacgatggccagtgggcctgtctctggtattgtgtgccctgggtttccaggccagcagacactctatattccaaattggcttgttgctgaggagagaaggaaagggagttaatgcatataaaccccctaccaggtgcccggccctggtcatttcacaccaccctggtgaggcaccagagaggagcagcattctggctgaggctacacagccaagcgggaaggattaggaagccagtgcccttgaagggacaggcagtgccaggtgcagcatcctgccccaccttgctgcatcccgagagcatttgtatctgcctccgggggatggctctgtggctcacatccccctcttcaggcccggcactgcagccttccctggcacaggggaagagcaagggttgctccgtacccttgagttggacctgttgtggaggctggcctgtctctccactgcccctgatagaatctgttctggggtaggatagtggcatcttccagctttctgtctggtcacaccaagggaacagtcagtcctggacagcagtgctgtgatggggcgggtagtgcctcgatgagggagtcccagcctgggagtgaggcccgctggagggagctcctgcttgcctctcactggccgcacagcatggagaatgactcccctgtctggatgcagtgtgctcgtggtcaagtgcagtggttggttccatttttccataccctcctgaggggcacacagccggtgcttacttcatgggggctgccatgaggatatagtccaggcatccctgcagagacccctggatgtccctacagagcccagggcctgagagaggaaaaggctgccctgggctacccctgggctcctgactcccttggtgatgcttgcggtgggaagggggaggtggagtctaccttccccaaatggtggcaactgcaccgtggaggcggaagtcccagctcctccatgtgtgacccaggccccacctgccatctccaggcccagctgcctccatggcagccccagacagtggtgtgcatgtggctgtgacaacacctcactccgggcctctcaggggaggctcacctggccagtgggacctgggtcaccttggacagactgggcctgctgtgtggcctcaccatgtagcttgaaatccccacgtgatcaatggctatcgcagggggcctcagctgtggttggcacaccccacagggcaaccctggtgccagggaggctggcattcccgggacctgaacaagccacgtagggccaccggcatctgattacaggctactgtgacctcaaaccctggccggcatcctgcaggctctgggaacctgccgtgcctggagtgtctggggaggaccgagaagtcaggacagaaggcaccttagctattctctcagcctgtagacaccctgcattttgctgagccacactcagccttccagaacttgtatccttcagcccaggtctgcccccaggagccatagaggcgtgatgttgtctcagagccttctcttcacaacccacccatcccgtggcaggatgtgagtgtcatcctgctgcagtcacaggctggagcccacaggacctgcccttgtccaggggtgcattagtctggtcccacttctcctctcccgggcacacatagcagcccccgcctaggctaaagctatctgttaagccctccgcatttcatgcagttcccatgcagaggcacccacctctacaggcaggctgtgagtgagaacgtcttgaggttgtgacttgtgacttattccacagtctccctcccattgagctcagtggctggcacacagacatgtggctgtcactgattctgaaggtacctctgagcacctgcatgacgccagttccatgccaagtgctgagcatgcagaagagcctcggacatgccctgctcccaggcagagcctgggaacctggcagatgcacctgtcagcttgagcctggaacagtgcacccttggggagcagagagaagggatcctgagccaagagaaggggcttcagggagggtgccacctgctgggctgacagggatgagaaggagtttgccaccacagtatagggtgcaggaaggcattggaggccaaggattggtgtaggcaaaaaggcagaagcaggttcgtgggatctacatgagcagggcagtcacgtctgctgaagctagacaaccaaactgcggaagactccctccaggcctggcacagcggcctcccaggggggtgtttgtgaaacccagatgtgaggacatctggatgtcacctgtttgggtcctggtttgtactgtactgtaagcccagttttcatgcactattgagcatgatcagtaattatctctggtttgctcagccaacagacaaatcatttcctccctgaaataaccagttccagcagtggcctttcacacgtccagcatcaatccagtgtgaagattgggagggcctcccgggcaatgctaggttagccctcaaagtgtggttctaaccctctaacagcagttctcctttcatgactgcctgccatgtctctggcacagttttggggactttcatcctcacgacaaccctatgaaacagacactattatgatccccattccacagatgaggaaactgaggctcggagaggttacagtgtgatgtggctgggattctaacccaggtttgtctgattctaacacactctcttttctttgcacaatgtcaaattatagactaaagaataaaaatgaaatcttggtaaatgtggttcctggtgacttagctgtggttttgcagctgcttcaccataaagtctgattcatctttaatgagtgagttttggagtagattacctcaaaatacacctgcagctgcatagaggccccaggtcagcaggcctgacataagggcctgaggtcacatcgaatggattccatgactcttggtgggcggacttggggacatgggggtgggccctggccatgccagcccaagccagcggcaccaagcccaatgcacacctgactattggggcatctgagaagggtggttctgttagcgctaggaggaattccatggaaggagaacgaggagatattccaagattttagttagggctcatcaatttcaaaacttgccttgaatcctgaccctgcggccgagctggtcacaccagcaaccaaccatccaactgaagccagaaactctccacttgcaggacatctcctgatccctctctttttcacatatcctgttagcagtatgagctctttgcgttttacccgtggtattcgtattttcatattcgttttcatacatgtttctagcatgcaagcctgtgcctagccccgaggaggcactggggaagccacagtgcaactgtgacgtgtgggcggcctgctgtgcgtgtgctccagcaagtccagtcgcgggtgcgaggtccattctccagcgtggaactggccggcgggtgcacgcaccagcgtggagctttcactctgcattcactgactaatgcttgagagttcagactgtaattcacagatgaccaggggaatgtcggtgtagcaaataataagtgcaggttgttctggaaagtctttccaggagagacaaggactgtccatgttggttttggggtcttggtggggttccctctgtgtcctccttcttagacggctgcccattgtctctgcaggccccctgccctcagcggcagccctgtcatctctgacatctccttgatccggctttccccgcacccggctggccctggggagtcccccttcaacgccccccacccgtacgtgaacccccacatggagcactacctccgttctgtgcacagcagccccacgctctccatgatctctgcagccaggggcctcagccccgctgatggtgagtagggtgtggggatggggaggggcagctagggcactggggcagggcgcagccagcctctctcacgctaacactgtcaactcctcagccttggtccccttgaatggtgaccaggctggctggcgttccttcacactacttccaaacaacaagtttttgggttttatgctcattaaagagcctttggtaagcactcttttgcatgcaaaccatatatgatctattgtaataataacagtaagggtctatccaggtaggtcctgtgtagctgagaaccactggttgtaaccaaccaaagcctgcagaagctggtgttaggaaaggggatgttgtgttggagtgtctcatgcagaaggaaggcggagtgggctggctgctgcctgcgtctctgttggatctgccccttgcaggttaacgcaggaggcctccaagtggcagcccaggccctggggctccggggatgaagctgtggcattgtgttcagatgcctgagagagaacattgattggcccggctcagagatcagatggccaccccggtgtgactaatttcagccagaaaagggcagggtcacatggtacaaatatgtctttatatgtataaagcagatctaaagttttacacttctagtccccacccaccccaccaacagacacatgcaaacacatattagtaacccggacatttaggggccagtcccaccatgccgtctccctgggaagtgcacccccatccatagcatggcatggccccgtgccgcccctgagagcgctgttagccactcattgtccccatccttgaaagcagccaagtgcaacttctcagaattcacgaagctaagacttgacctctcaggctagaggacatctgcaacttgaacttcagagccccatgggcagaggctctaggaaatggggtcccagcgagtctcttatcactaccagcattctccccgagaggaatgcatcctcttccaactggtgggtgtgaccacgagttgaagcggaggcctggctctgagaatgtgcaggctgggattgcacgatgaaaaggaggcatccagttttcaaatgtgcagaagggctccctgaatcgttgactcatcttcctggcacggaggtttgcactttgcctggtcctcacaaaagagaaaccaaacaaggcaaatagttgtagccagggggcttgaaaatggctagctggaatgtgacaccattctgaaatggcccctcaagtcagaactcagccctgaactctgcgtgcgtcccctgtgtggccttgaccaagctggggtgccctgaggcctgtgctgcctctatgcccagctgctgtcttgttggacagtgggcccagccctatccacatcactcctgaggtcccagtgctgggattataggtgtgagccaccatgcccagcccatgatgggctgaccaagagtgagaggacacaggtcaggttccagagtctgcctggctcacactaacactgtcaactccccagccttggttccctcggacagtgaccaggctggcgttccttcctactactcctgaacaacgggttgatggtcacacctagtatggcagctgaggggtgccccccaaaacacaggtccatatcctaatccccaaacctgtgggtattccctcatttggaaaagcagtctttgcagatgtcattaagttaggtctcttaagctgaagagatcatcccagattatccacacaggccctaaatccaataacaggtgtccttacaagagacacactgagaaggcagacacattcatgcccgcccagagacacacacagagtcacagaggagaaggctatgtgaagtcagaggcacagatgggagtaatatggccacaagcaggaagctggcagccaacagaaactggaagaggcgggaaaccatcttccccttgagcctctggagggagtgcggccctgccagcaccttaatttcagatttctggcctccagaactgtgagagaataaagttctgttgttttaacaacagttaacacaaagtttatgctgatctgttacagcatttgccctgggaaactaatacacatggtaacagggcttccagtgaagaggtggaaggaacctggctgctctcccagggccagggccagagggccagtaaagacgtctacgggaggaaggaacagagcaccctcctggagatgctcaggaagcagagacgctgtattccactgattgcagtgtagcccatgaagagctgggtgggctgggcacagtggctcatgcctgtaattggattttcggaggccaggtgggaggatcgcttgagcccaggacttcaagcctgcagtgagctaggatcgcaccactgcacttcagcctgggcaacagagtgagatcctgtctctaaaaaaaaattttaaaaaggagctgggggtggtgagacagagctgcccctggaggagaggccttcgacggatggagtgccatgctatgcatgagttcaagataaacactgaggtagctcctggaacacccacgtacccgcttacagccccacgacatagcagggacctggctaatttgcatggccctgactcccacaggaagtagaccagatacgccaaggcctcatcagcccttgggctactaagtgaccaaggatggcagattaggctcaagagcagctggcaggaggtctgaattcgagtcctgtgtgccctgctcggtatcagccccagagcctgccatgtgaggttaggaagctcatcagcgatccgaggcagtgttggccagaccatgtgtgactggggacaaatgggatctccacggaaggttttgagggaaggtgggtaggcaggaaggagtaggggagggaacttgaggcatggacaggggaggcagaggctgtgggcgatcagcctggctggaggcccggactcttgggagatgcagcaggagatggcaagaaggaggcagaggaggacggcagcttccatggcctggtctcctctctctgccaagtgcataagagagctcttttggaatttgtcgagactgctaacagagaggccgtagtgcacagtggctaggagcttgcttcctagattcagactgccctctttgcacacctgtggactcttgatgggggtgctaggtttccaagctcccatttgtttcctgacaccaccctgctgagggccagcctccctcagatgctctgaatttcatcctcgctgcatctttcctaagacctgggcagggctgacctcagggttgaagcagacagccccgaggctctgcgctgcagggataaggatgtgtgcaggccaggagctttatctggccaggcctggcgccccggcagcgatctcaccctgaatgttcaggcacagactgacctggcccagccgcgtgccgctgaagtgcctctgtttgcaccttcttttaactttgaagactctgctggactatggatcctgttggcatggggctccgggattctgaggggcatggaggcagagtagggagagattgtttatgagtctaatgaagtggtggagtacagaggtcggggtctggcctccttcagcagcaacaccgcagctcgtgctggccaagcccaggcccagcacagtgcaaacagtggggcagtgggggaaaatgccgaggagagaaaccccgacaccaggtgtgcatttctctctgccttttttttttttttttttttttttttttggcaggagaaggcacagccagtgccaggttctgacggcttctttctctcccctctgcccacagtggcccaggagcaccttaaggagaggggactgtttggccttcctgctccaggcaccaccccctcagactattaccaccagatgaccctcgtggcaggccaccccgcgccctacggggacctgctgatgcagagcgggggcgctgccagcgcaccccatctccacgactacctcaaccccgtggacggtgagtgctggcccccaggggctgaggatggggctagcagatctcctcttgaggctgagaaggtcactcgctgtttcttttggggacaaggacccttaaggagaggtcgggctgtaccccaatgccttccaggatggctgtccacaggcactgaatctttggacaacacttactgagtcaccacaggccaggaggcgttgtaagcatcgcagacaccacagcaaacaaagctggaacttacagtgcaatggggagaaacagatgccaagtagctctaggaattacgtatgaaagtagccaattataaatggaccagggaaacaaagcaggggcggggggagcgagcactgggtgagtggggtgcagtttggaatggggaagtcagaggaagcctcactgggaagttgaaatctggggggcgagtgctccaggcagaggaaactgcagtgcaaagggcctgaggcagcagtgggcctgccaagctcaagaaatagccaggagccagtgctggcagtgaggggtgggagtgggggtgaggccagagtttccaggtggggtcttgccagccagtgcacctcagaagagactggctttcactggagatgaggctgggcagaggagaaaagagagctgactgactcacagaaggaatctccttccgtgctgatgtgagaattgatttgggggcaagacggaggcaggaggtccagttggtagaggtggggagaaggggccaggtcttgggaagaccttgaaggtagaaccacaggatgtgctcccagctggaatatagagttgaaagaaagaagggagttgaagttgacctcagggtctcgggcctgagcatttgaaggatggagtagtaactgagctgggaggctataggtggggccctcatggaagggagggaagtcaggtatcctgggtagatgaagcttttggtgcctgttagacacgaagtccttcccaccctccaaatgccatcctcacagctgctttcacagggacacctgtgaccctctgaccatgagcctgcggtcagcaaggagcccgtctcaaggaatagtggagggagtggaaggctcagcaccccctcccatcccccagtcagcgccactccgcctgcaggtcctggagccctggccagcggcacacagggaggcagggcagccagtaaagctggaagccaccacagggaacaggcaggcacctcctgcagagccagcctcccggagccctgcctggggtggcgttttcactccctgatagcccacggcagggagacaggagcctgcagggagaccgtcctgcaggggcagccctggtgcctgcagggccgtgcagcctgtagcaggttggggtgggctggtgggaaatcatgtgggaccaggcggggccatgagactcagggtgggctgctgccttgctcaccccgacccgcccccagggctctgttccaggggagcccttcacttctctaaggcctggctgacatctcgcctcctccaggaagtctctctggaagcctcctccttccctttcccctgcccccctcagtcactgggacagctccctcctctggctgctccttcactctttgcctggcccacctcatacttacagcaaccacctcacattgctcctcagctatcttgaacatctcctgcttcccaggaaaagttttgctgagaagagggcggccaacctccgaggctggcccctcatggatatggtcctcgccaggccctggtgggaggccataacatgcctcagtgatgccaccagaatttggtccctgtgtctgtcccgttcttccttgcctttcccagcatggtgtttagtccagaattaagcacaccatccagatgttcaacaacacctgtcagctctgtaggacattgacgtccctctgagtacacacacatccatgtgctctgttcccctctcctctcagcagccctacacggtgctcccacaagccacagtgaggtgtcagagatactgagagaaagttgtgtgctagacacgctccttgccaatattagaaaccaaacagcagcaaccgagtgcatgaaggatcatgtgcaaattgccacacccgaatgtcagcttcctgcaagcaggacccttcttccaagggcctgagggtggcaccaggccaataggaaagtggacgaggcagagaaaccacggccaagagaggtgagatgaggcaggtgtccccacagggcaggaaaggctaagccaggcagccgggagtcatccagtgattttcagcatgagcgtctgtgtgtgcacgtgtgtgtacgtgcacacgtgagagacagtgaattggaatgcagactgcctctgttctgtgcttttaaacacattcttccatgtaattcccttagccaccttctgaggctagaaatatgctccttactttaagatgagcaaatgggctcccagcatctagcggcttgacccaggccttgctctgtttgttaccagcaccatctgcccttccctgggctgcagttttcagcagcacatgcacctgaccaaccatgagccctggcccaagggagggccagccgggccaggtggacttgagctcagcccagagcagctgggccggagccagaggggagaagtagtacagcgagctccagggcaggcctgggtcaggcctggctgcacggtgtcctccctgtggtagctgggctcagaggtggtgacaggactgaaggggtgtggagtggcaatcccaagccctgcgagctgtgtggattaaacacattgactgagatggcacatgtgagcctggcccagtgcctggcatctagcaggtgctggaataatgctggtgcaggtctctttccaccagtatatctttccctctttaaatccactcactcttgcaggattctgtatcttcattgtaggcagctctgtccacctgctgcctaagcccaggccccaggttctcccagaccttttccttgccatctcccatccatcccatcctgtccctcaggcctccaagagtggcgtgtcacccctcccgggccagacagtgacatatcgccctcgtagcactgctccatggctgctgctcatccagcatccccatctttatcctctccgccatcctgcgctcagcccctgccacttctagccccctcaggataaaatccagactttagaacccccgtccagaggccttcctctccagctcatctctctccactgcacactggtcttgccatgcactgccccacatgcaggtccccagatacctccctgagctcattcctgcacagagtcctgtgcacggtgcgctaggccttctcctgagaccccacaagaatccagccccaggcctttcaagccaccaactagctccactgcactagcgggacccaaggcgcccccaactggaactggctgggacttctccttacgtatggccgatggcccgccctgtcaggtctgggagcacatctggcaaggagcaggtcctctgtgtttgttgggtgagtgagtgaatgagtgaatggcacttagaaaagaccctggaatggaaagatgcgctccagctaaggaaagaagcactcgaggaatgtagctgttggctcacaggggactggaaggggctggggagcaactttgccttccgggcactcagcatttggcagccccgggggctgagcatctctgggaagcagcagaggagtgcagaggtgagctcagcagtgggcgcgagagctcccagccctccagcagctgctggttaactcatcacaccccacccgctgtgccttctccacctccgccttgggaacacatctggcttcaggacatggaggtaacggggaagcatcaccagattccagagtccacctgaggagggatatcagtttctccagctccagtatggggtgggggtgggagcatttttcttatccatggatttcaggagcagatgccttctttccctttgttcccagtcagttacaatccaagaaaatcagagtagtccaggattatctcctatttttattgctacttaatacattttttccaaaaccagtttcaactagaaccagaaccttcgcttcaccttttaaaaatgctttccgcacttccacttagctccgaggcctgtgtggacggttactcacgtatgtctctaagagacgctgaacacaacacctgggctctcagccaggcggctcgggctggacctgtctgtggggtgtcccccggcccctcccctcccgtgaaccatgggagctggggaggtgttttcggtgggtgcctgctccatgggtctgtgccagtccctcccggaaagctccagaccacacagcagagaatgtgaatgagcgtttccactaggtttctttttgctcaaatcctcactgagaaaattgtgtgggccatccctggcgccagcagtgcagctcaggagacctgtggaaggggcctggctctctctgaggaatgtgtgttcacaccaggaagcccccatacacatcatcttgagcatgtgagctctgtgcaggcgcagggggcctggagagctcatggacagccaaggagaacaggccttctctctctgcctttctctgtcgttgtgtctcatgcacacacgctggttgattcggcaggtgtttattgggcaccttctatttaccaggctcggttctaggtctagggacgcaacgcatcatgagcagcacacaagccctgccttcctggtgcctgagctccagcgcagccctgtgtgagttcctgggcgggaccaagaatgcctgtcccgacctgacgcccctcataccccagcctcctttctcagcaccttcattcatggtcccagaggagggagcactgtaggggagagaactttccagaggttttgaatgtccagccaaggcatggagagggctctgccaggcaagagggcgagcagggagaggtgggtgggaactccatgtgggtcctcatcctgcagggccttgtccccagtacaccggtttgcaaaccaccagcccagtttttaccttagctgagtgccacctgcacaattgtgtatttagtaatattttttaacagactcaccttttggggttaaataaatggttcttcaaatggaactttgtattttttctgaaatggaaaacctaatccctgtctgaagaggatgttcctgtctctgtctccatcaaacctaaagtaacctcatctgggccatgtgtggccctacatttgggaacacactgcagtggtggaagaaaggccagaagctagagaggcctctacggggctcttgtgggattggaaagccaagccctgcgttcctcccagggcactgaggccagggtgccggcaggacagagggatttcccaggctctgatgaaaacccaccctccctggtctcccagtggtgggtgaaggcccatttcctcttgtttttaaaggggtcctgatttacagcaggaagacaggagcgctgctgtgtgggaaggtgatagagaaccagtcagggaaccgaggtcatcattctgctgagcggctccctggagagcggagaattcactggttgtcacccgggccctaaaatggaattttctcatgttatgctgttgaatattggtgatttaacgacagaacagccaccccctccccctccaccacattgagaagattgagatgtttccgactgaaatgttgtctgtttactgctcatactgcctccaagccatgcattttattgtcatattgacactaatttggctcggatgtcacctccattctgacgcctgttctttatgctgcctgtggatccggggggttttcagaaaccaattacattgatcaaacccagagaggcaggaagagctggtagaggggctgccagaggcccaagtcagacagggatccctttccgagacaggaaggggaaccgaggcaaaggaagccacattgcaggtccctgcgtgagatggtggagctgctgtgtacaggcacgggctaagcggtgtctatgggccatctggtaaagccacacagactgtcccgccacaccagcttcacgaagccgcttcacaggagcctgcagcacagcctgtttctctgtgttcatcacttagctaggccgtggtcctggcaactctgagcctcgctgctccacggcccaggcgcttgctactcccccatcagaggggtgagagggctgtggatggctaggtgtggggggcattaaggtcctcaggtcagatttccttagagcatctcctcggcaagccagaaaatatctgggtgagggagttgggctatgcagggaacacatcttagccagtgaggattcagggtacccgagccccaccaccaggctgcatcctgctggccttgtattttttcctgaaatggaaaacctaatccctgtctgaggaggatgttcctgtctctgtctccatcaaacctaaaataacccagccccgggctgaggatggcatctggcacagagaaggctcctgggaccaggtgccaggatgatgctctttcctcctgcccctcagcccaggctcctgggcacacaggccgtggggggatccccagccccgattccatgcaagtccacccacaggtatagatgatatgttggttgtcagcccatagcatccctggggtgggtgctggtagcccatcttctgcatgagacaaccagtgattggctcaaagctacccagttcagagtgtgcaagcagggttggaacctgggtctgcctgagtccagggcctgttcttgcatctcctgcccttcctactgcctcagggaaaacaatgatctccctcctgagcaccttgggattctctagaataattctgcttagatggcaccttgcaaatcctgcctggtgcctcggagtactgtcttcatctctctcctacatggtgagctccatgaggacagggtcagaggcttccctgcccagagtccccatgatgtccaatcaatgcctggtgtgctctcagcactacacgaggggctgatggatcaatgaataaacatgtgaatgagcaacagaaagcgctagtgggtgaagcaaggtccagaggcaggtggtgttggcgtccgcccaggtgagggtgggcaggtggccagtcacccgtggccgaccggcattaaaacaggcgcctccacagatgaatactccatgttcccggtcataaatcacaggagaaaccatgggaaatgagtgccaggcttttctttctatttagtaatttatcaagggaagaggcgcattaataaacatatttcccatgagaggcggggataacagagatgaatatcactgtcagatttggcctgtttcctcttgttaggggcacatgagagggtgggaatccaaatattagcggcagattcttttttaaaaaatgtgttacgaagatgtgtgtgtttcttactttatatcatgttaggtggtttttcccctcacattaccgtatttgccactcagtttgtaagtaataggagcctttcagagaattcactcctgcatctttctttgagtttcctttgaagcgaggattgacaaggagtggactcagtaaataaaaacccagaagctgagagggcgccgaatgcaagccgatgagtgaatgtctaatgacagctgtgttgctgagtggcccaatcatctttcctagacttgctgcccttcactccattattgactggaggctcaccctgccccttggaacagtcctcctggcccttgaagaagccacattcattagcaatttcattttggaatgcccgctgggttttaggcactattcttggcattctatgtgtgtcttcacaacagccctgcaaagcaagccacactgccctgattgtacagatggggaaagagaggctcaggaaagctaagtaaatgtgctccaaggaagccacaaagtgacaggcttgacagggacagtggcagaggctgtgtgcctctgcatcttgtgtgtgtgtgtgtgtgcgcgcacgcgcatccacctggggtatgtgtctccacctggggtgtgtgtctccacctggggtgtgtgtgtatgtgtccacctggggtgtttgtgtgtgtgtccacctggggtgtgtgtgtatgtgtccacctgggtgtgtgtgtgtccacctggggtgtgtgtgtgtgtctccacctggggcccccctcccatgcagggggccctccctgtgccttcctgccgtcatactccctgccccctgagacacctctcctcctctgcaccctgggcataggccctgtggcaggtggttttggtgtccctgtaccttgggcaagttacttagtgtcctgttttgtcttctgtaaaatgagcataacagccccttctttatgggacagtcgtgaagattaaattacttaacactttaaagtttgaaggagtcctagcgcatgcgatgatagcattgagtaagtgctgtgtttaggtgactgtgaatctgttctttctcaacacatcctgtctgtgccatgggtcagcccttggcacctcccactgggctcatggctgtgccacctgtattcgagtgttggggatggtcaggtgggaaaaaggatttgggctcctaatgcatggtgagaaagacaggagcaagcagataaccacacagtggatgaaagctcacccccacccttgtttggagagagaggcctgagcatagggaagatctgcccaactccaggaggtcagggaaggcatcccaagggaggtgatgactcggctgaggtctgagcaggcagaggaagctgcacgtgcaagtccctgagcaggtgttatggaggaggggctggaaggagacctggtggctggagtgaggagattccacagggccaccgcctaggccttctttgtaacagcagtggggatttttggaaagttttggggagagggcagggacatgatcttatttccaagttgaaaatctgtctttgcagtgagcactgtggattggacagctgttagctgagggccccagaatgatccaagcaagtggtgggctgtgctaggggtggagtttgaaaggagagattttgagaggcgttcacgagcccacacgtaagtgggctccattgtggtggaggggaggagggaaggccgactcccgggtctcccgctttgccactgcgcaagtagcaggcacgtgctgtaggaagagctggtccaggcacagggcaggagtgtggggctggctgtgccaaactggagctgccttgcagacaggaggagaggacgaggaggcagctggctctgagaaggctcactcttcagagccactgaaagtgggaggtcgaaaagtgtttgtgggacgggacgtccgcctggccctgggcctctgctgacctctctgaagatggacagagaagacacagagtcattagaaagtccagacatcagggcttctttggacctgggttcaaatcctgcctctgtagctctgtgaccttgagcaagtcactgacctctcaagcatagttgctttgctgcttatctggtttgcttggaggatggtggtagctgttaaatgagtcagtggatctaagcgtcactaaatggtggttgtcactgggtcattatttgcataagaattcagaagcaggcatttatccagatactgcatcagaggagcacgctccagccaggatgcagatgctgcagcagaggggcacactccagccaggatgcagatgctgcaacagaggggcacactccagccaggatgcagatgctgcagcagaggggcacactccagccaggatgcagatgctgcaacagaggggcacactccagccgggatgcagatgctgtaacagaggggcatacaccagccaggatgcagatgctgcagcaaaggggcacactccagccgggatgcagatgctgcagcagaggggcacactccagccaggatgcaggtgctgcagcagaggggcacactccagccgggatgcaggtggtgcagcagaggggcacactccagccgggatgcagatgctgcggcagaggggcacactccagccgggatgcagatgctgcggcagaggggcacactccagccgggatgcagatgctgcggcagaggggcacgctccagccgggatgcagatgctgcggcagaagggcacactccagccgggatgcagatgctgcggcagaggggcacactccagccgggatgcaggtgctgcggcagaggggcacactccacccaggatgcccctgtttgccgtccaggatccctatttagagtgggtgatcacatttgcagtgcagcctcacagctggctgggaggtagcctgctccatgggcctccctgcttctttctgtcctcaggcaggtgacctaggatccttcctgctgtaagagaaagaaggagttgtctgagtgagttacctgctctgccctggcccctctgtggggtcagagcaagtgggcatccccagaagcaactatggaccgtcttctgtgtacccactgtagctctgcttactaaaatatctgtaagccccagtcttcatagcccaatagaataaacagcgaaagcagaaagtttagctgacaaggatgtcaaaagaaaagaatgttctgattaactccactttttttttcaactgggagctttcctaacatcacttaactcttctcgttgaaaataaagtataccaagtactgggtcacatgaccatctcaactgtagccactctggagagcccaggccacctccccatccatcatcccactgggtcacagcaaccccagagctggcagggacttgttttatgctggtgtcattgatgaagaccccaagtctgtgacaggtaaaacaatttgccccaagtcatgcagctgacttatggctccagcccagggtacccggtgtgcagcccccacttcaccccactgcaggccactgttccagtccaggtctccatccctctacccagagtcccttcatcccaggctgctggctgtctactcccctctgtggcctcagactcccctcatcccatgaaagaggctgttaggagagaaaaccctggaagcccctttcggcccaatggtcctggatgtcctctgtcctctctatgccttggagaggtgcttctcctggtggcctggcaggaaagagcctccccagggatccctaggtctcctcagggttgcagccaagcttggggctgggccgggcatggttgcctcgaggggccaacatggatcccagggcttgcggcttgttcagtaggtgggtgcgggctctgccctcacacagccttcttggggactggtaggtgtggagtggggggctcagaggctcgtaggccatcaccccctgccctcggtgctcctgcagctgtggagacataaggaactgccacgtgcatgattcagagtggccctaaggtcagtggtcaaagccatcaggaaagctttgggagcacccgccaagaggctgtgtgtactgtgagcaggaggcccatggagccagaccctgcagtcagggcagcctgcctggaggagggggcacccaggaggggtctcagcaggtctgagcaggcagaagggaggaacgcagttatcataagcctgggaacagccaagcacagacatgagtgtgcttgagcaacccccagcatcatttatgggcaacaccaccagcccatggggaacccggaggcctggaaaggatgggtgggcaggggccagcgggacatgagaagaggctgctccatgcaggtgtccagaaagtcaaggacaggcccaagcatttactgtgccctaccatgggccaggtgcttctcacgcttcgcctaatttacacctcatgccagccctggtggtcagcactattagagccctttaaaaagaggagactggctctgagggatctggacagggcaggaagcttggcttgtggagagtcatccagcagtgttgtcagaccatttctaggccaccgtttgttcagggcagagacctagaatcctgatgggggcaccgtgatggggagcagtctggaaccacagtggaagagcctttggttctagggtgcagggtactcttgtctggggcaagccctcttcccttccacagttatgtaggtgtgcgacagcagctggtgagggctgagggcatagccatgtgtccacacatatgtgtgcatatgcatgtgtacacatgtctgcgtgtgggtgcacacaagtgtttgcatgcatgggtgatgtgtgcacctgcgtacatgtgtgcctgcatgcatgtggtgtgcacattcaaagcaacagcttcccagagcctcgggcgactttagaactgaggacctcagtacgcagaagcacctgcctgtgtcaggatgcctctcgctgccatgtcctcgtgtcctccctgccctgttacagcaggctgcccagtaggctctggagagacagccaaaggcccagacattgcgaagagtctgggggccgccatccaggcctctgcttggcaaatgccctatcagggggcactttagtggtgattccaggtacaacgtgacctgtgaccttggagcacttacttccattccctctcttccccatggaattctccatagcagtgggaacaggcaagcttctgccacacacaatagcatggagaaatcttacaaactgaccatgtggatgaaggaggccagatatgaaagagtatttaaaaattccatttacacaaagctcaaaagtaggcaacaagaagctgtgtgttagaagccaggatagcagctgcccttgggctggaagatggagggggcctgtggacaatggccaagcactgtttcttgacctggggctggcttcccaggtgggctaacttggtgagaggccaccgaactgctcacttatgattcgtgcacactcctgtcatgaggtaagcattgctggattccagccctggtctctgcacccagtggtaaatacactatgctcagtgctcatattcactcgcccaaacaccttacatgcacttctccagtcctcaccacaccctgcgctgctcagtccattttacagatcaacaaactgaggccgagaggtgacatccttcgcccaagagcccacagctggaaagtcggcaaagctaggattcccattagaccatccttgcaggctcttcctatcccccacccacatgtcaccccctcccccatccccagtgatgctgacctgtcttgtgttgactatcccacagtgtcccgtttctccagcccgcgggtgacgccccgcctgagccgcaagcgggcgctgtccatctccccactctcagacgccagcctggacctgcagcggatgatccgcacctcacccaactcgctagtggcctacatcaacaactcccgaagcagctcggcggccagcggttcctacgggcatctgtcagcgggtgccctcaggtgagccccgcctgcaagcagagagctgaggaccagagctgggctgagggcccggtggggaggcgctggcttttcagtgggcgcttttgacccgaggagaaagacaggacctgtggcatttgtgaatccacatacttgcaccttttttatgaattcaaaaccaataatgatcaaattgaaatgagcccatatctgagtacatcttcatggaccaggcctgtcatgaatgactcaaatgtgaaatcaaaggtgtttgaggtcaaagatggttttcctagtatttcactgaatttggtggagcagccaagtattggccaaccttggagaccacacaaaatgtgacattgacatggcccatgctctcagcaagcctctgggctggcagcaggcctccctctgtagccgcatggtggcacacccaagcctcactgacaccagccacccttctcccttctgtgcggctctagtctgtctgaggactcagaccccagccagcttgactgaaactcacatgcctctccagcacctccggaagaggccaggaggagttaggaatgtcaggagagtttgtcccaacgacctggagatggaaggaataacaagtgtatttgttatcttttgctgcctaacaaattgctccaacgcatagcagtttaaaaccacaagcaattgttctctccccccatttctgagggtcaggaatttgagacaggctgagctccggctctctcaggtggccacagtcaagctgtcagccagtgcttcatcccgccgaaggcttgactgggccagaatgccccctcacagcgctctcagcagtgtcctttgttcctcatctgtgagcctctgcttagggctgcttgagtgtcctcacaacatggcagacgggtcccagcccaccttgcagcctatgatgtgagaggaagctggaggaagccacgatgtcttttacggcccaaccacaggggtcaccaatctttccttggtatcctgctgtgtgaaggttggctcttatgcaagtggtgtgacagagcctagaagtgcagtaagaagaggagaataatgcaagctggggggctcagggcaagattcctggatgagggggcattggaacaggattcggaggcctcatgggtttcacgtagtcagggagcagcgatacagacatgcgtctaggtatcacagcagtggagaggccagggtgtggggatgagctggagcctggtccctgctgggagccagcctgccaggggtgaagtctacatcctggggcagaacctgggagctgatcgcagaaggtgagtggcagacagtaggaagccacagctggttcttgagtgaggaagccacggtgatggtggggctagcaacatgctcatccctatcccctgggcaaggttctctctgtccaggaagtgtcagcctaagagagctcccgatcccccacccccacttccttgtctgctctctgttgcagcccagccttcaccttcccccaccccatcaaccccgtggcctaccagcagattctgagccagcagaggggtctggggtcagcctttggacacacaccacccctgatccagccctcacccaccttcctggcccagcagcccatggccctcacctccatcaatgccacgcccacccagctcagcagcagcagcaactgtctgagtgacaccaaccaggtaggtgggtgcaggggccaggatggccactgggtactcatctggacacatgagggttgttcactgccagctcatgctaagaacttgtggagggcctctggatttacgtctggccgctagggtgccttctgggcagaggccacgttacagaaagggtgagacctgggctcagtccatgggaagctcccagcttcttgattctgccgtctcctgtccaagaagcataataagtagatggagaaagcctcgattcccagggcctggcaccatggaggcactccatgcacagcacatagcatgggtgggtgagtgaatcattataagactgtgcagtttcgttgtagaatgtgcatttgcagcaggctttcacacactgcctcattcgacccttccaacgggccttgagcatgcctgggcatcctagtacagtgcctggcacatcctaggtgccattattatttggcaaatgaagtgttcttttacaataaggacatggaagggcacaggccttagcatcagtcagaccatctttgggatcccaacttgcctgaaagcagcacatctctttccctctcgcagcctgagctaacttatctgcagagtgggattcctgatgcctaggtggggtcactgtgcatacaaacaagctcatgtgtgcagagcccccataggctctgatcctgggagcactgacaacgacaatgccagaggtgaagggaccaccccaggccacccaccagcaaatggcaaagcctggatgtggctacacccttggaaggaagacaggacaccatgtcctctagaagtgtcctctgttccagaatgtcctccctctccaccccagggctcctggtggctccccagagcctccccacgacagtggctgtcagctctggaaacatcacctgatactttagctctagccccttctcctgaggaactgggctctggccccctatgccctgggctggccaggccctgttctcagacccacagtgtcccctgctctggagggctgagaagttgagcctggtcagaacaggagcaagggcaccctgcattttccaaagagaaggtctctttcccatttcccagaagtcttggggaggcggtgatggagagatgggggttggcatgcccaggtctgggtgctctcctgtagcaggacatgtgcccctggcaggactgagctggggactctatttctgatactttaaacacagggttagcccagatggtctgtgcggagagatcctagagttaaagtccaaaaaaatttgggatatccctgccctgcccctgagtaacagactgtcctctgcacccttcctcagaacaagcagagcagtgagtcggccgtcagcagcaccgtcaaccctgtcgccattcacaagcgcagcaaggtcaagaccgagcctgagggcctgcggccggcctcccctctggcgctgacgcaggtaacctgctgccagccgcaccaccttcctccagctaggaccaggcttgtgggctgccttggggctgtacccttggtggtgaacggatggctggctggctgcctgcatggatgaatgagtgacccagggaggactgggtgggaatgctgagctgtgactttctcaccactgtgttcccagcaccctggacatactacattcccatcacacatggtgaatgaatgaatgagtgaatgaatgaacttctgcctagccatccctcttgtctcaggctgcatctgtctctctctcgccacacctgacctgtgtacagcaccagccacagcctagttgagttgctcacgtccccggaatggcccaggcccttctaggctgctgtcgctcttggaactctaccccaccctggctccttcgctgccacttcagcccttcctgattctcctgggtgataggactgagctccaggcccacacacccagcctagctcaggggtcacttcagggcatgtgctgtgtgcacacctgtctccctgtctgcactctaagctttggagaggtggcgctatgggagaagtgcctgactgggttccatgccaccagggtttgtgcaagtgtgcagtcactgacacagtattttccaatgattcaatgcacatttgagtcagtgagtggcgtggtgaggggggaagacaggacaagttcaagcggggagagaagagcggagcagcccacagcccagtgcaggcctaccacgtggcccagaccctgtgctgatccttttggaaactttgccacttatttcttctgctccaagacagcatgcgggcagcccccactctgggagcaggggcctgtcttgtaaagggcatgccgtgcctgttgacctggtaagtaagcccctggtcccccaagccctctcatggtggcccagtcttcattcattaccacagaagccgcatcttggacaccaaggatgctcagggcctcctatccctgtctcccctgcatctgccgagcatcctttatcaaaactgtgaaccatcaggcatgctctgggcacttaattttcatgaaatattggcttctgttatcgtcaagcaagcagagaggttgatgacaaattcttctccccttgctgacaccaaagccggtctcagcacgatgcatggtttccacggggccgaccatcatcgggagccaatgaaattgatgaggacggcacatatccagggaagataaacacgccagaaaggcaaggacagggccggcaggcaggcactgagcacctgggagccccatggccacacgccggtagggccctatgcccgccctccaaccctggccggccatacagggcctcctgcctgcccagcctggctctgcgcacgtgtcagtgcaaggaaagctgtttatcatgaggaggttgtccccccgtcgctcagtgtcccgattcactgaccaaggactccctgactcatttgtaaggtggatggctgacttccaggtcttctcaaagagtggagagggtgatgggaggccctctggtccactctccccatggtctcaccccaacagcccccagacgatcccattgctaaagatctggaaaggaaatgctcccacaccttcctttgacttgctcccaatgtagcccctggagctattgtacgacatgttgttgctttcctgttgggaacaagtggattcgttgaaaggtcctttgagaaacaatcaggaacccttctcggaagaggtctttgcagctcttatggaaagtcaggtggagtttgagtctccattgacagcagggcgtcctgaggctaatttcttccattcccagaaagggactcagcattaggactgaaattgtgacctgggcagctatggtaccactcattgagtccccggagccagtgggggttaggccttttgagtatggggcgaggtccttcatccccctgagcctgactatacatgttttccccagagactattctgaaagacaacattttcctgctggttttggagagagtttgaagtgcgaagcaatcttggtaacatctgcctctttgcttggctttgctcccagccttcctagcagaccagtggaatactggggagtccttgacagcccttgtaggccctccgtggactttccgtccctacctggagtatgagcctctccctgtgccccgaccccaggcaggtacctcctacctgtcctcatgttctctgctcagagggtgcccctggttagcatcagtgagggtagggatggtcttgtgggttaattctcagtctgttgccagtttgagagaaaaagactttgtcctttttgacgggaatttcagggacctgtgatcaggtgaaggaatttcaggtacctgtgatcaggtcaaggaatgtctcaggggtctttccttcgcctcattaaaatggccacatgggccctaatgtggtcaggggactcaagtccagacctaggctgcctcgagctcactgtgtattcatggggagggcctcggatcctccctatcgtacaagaatgcagatgcccatgcgttagggctgtggcagggaaaactggttccccacagcacttcgatgaagacaagtgtgcactggagaggaaggaggaagggccccaggacaggccatctgacaaggagagctgtgggcggggctgagttgaggaaaggagctaaaaaggctgatgagtgtgtgtgtgtgtgtgtgtgtgtctgcatgcatgtgttgtgtgtgtgcacacacacctgtaacacacacacttgcatccacacctgtaacagcccagggtccttggcacagaatgcatgggactaacagcgacctcttttcagggccaggtgtctggacacggctcatgtgggtgtgcccttcccctctcccaggagcagctggctgacctcaaggaagatctggacagggatgactgtaagcaggaggctgaggtggtcatctatgagaccaactgccactgggaagactgcaccaaggagtacgacacccaggagcagctggtgcatgtaagcttttgaaccccagcagcccgccaaccggggcacggcccaggccatgcaggatgctgagccttccagggcctctactagacagaaggggctggaggaagagacccccagagatgcctgggccacatcccctgcaagtgggaggcataattacttatgtgtgtcctgcctgtttttaagatggcttccaatacatatgtaatacaaacaattaaaagaaaaaataagtaaatgagactgtcagggaaaagagaacaataaagtgaaaccaggaatagagttagtattaaaaaccgagtgctttgagctatattctatatacacattttttttttctgagattcctaatagccagtgcaaagagggaaatacgattagttaaaccagccagtatctacacaataataagtgaaagaagcttctcccatgaaggaaggagttgatcctttccttttggggactattcacagatacccagtggatatgggtgcaggtgggcgtctacacccagatcagagaggaggttgcttaacagtgcctgagtactgacagctcaggtgattagagatgaccatgggagccggcgagaccttcaggatatgcctcttggtcctcattccaaactctcatactgcagcgtcccttatatggcagttaggggtgatgtgtgcaatgtgcagagcagaggcttggcacgggagacacctggctccaaacctgtccccaccacaaccagctgagtggttctgagcaagtgactccacctctgtgagcttcatttgtttcctataaagggggttgatgctaccccacaggagggtcaatcatgtttgtcagcacttagtgccttgcagacattccgcacctagcagctccctccttcctcctcctgcctgttccccacaccagccctgagtggttctctcttctccatccagagaagaacttaaattcaagaaagccacctcccaactccccagcacatgctccttggtgagtgagtgtctataaagatgaacccactaaattagtagctcgattgctgggaagagcagacacacacgcacgtgcacacacatgcacacacacacatgcacgcgtctccgattcatattcagaagctgtccagaggcgcttgcttctccccagctctgtgaacttagcatttaggacacgccgactccctctgcttcttccacttatgcaacttgctcacaaataccgtaggtttcttttgtgttggagtttgtcctcccaaacacagttctcacccagaaggccagaatttcccagcaaacgaatgcagctggtgaagcagggtcttatctaaccccttctggatctcaaacttaatttttcaacttgtaccacctctttggggtaaacaagccctagatggagcagggaccgtggagctgtgagttgcagaacaaatcagttagatgaaaggaggagagagggacagtctctcaggccaggggaaggccaaagccagagcatgcagatgaggatgtcaaagacgtgctctgtgataagtgggtcagccccaaagagcaggcacggaattcctcagatgaatgcggagggtccccaaactgggaggagggctttagccaggggcttctgcctgtgccctggactgtcctggagctataggtggccacctccaccaggccctggaaaaagcagaccccttcacccagctctgtctgtctgtctctctctgtttctctctgctccctggaaagatggatggagcaggcgcacaggcgagctggagcccctggtcgattattaacaatttgttgctaagtaaaccaataagaaaaaaatgaaagccattgtcaggaagcatttttatcatttgaaaggctttaaaaatggaaagtgaggctaatatgataagatttccctggaagttcaaagcgctggagatttcacatgctccagcaggggcatctgtacgcgtgacagttgggcgagtcgcacagggcatgagggcctggcagttttctgtcttctggggcaaggtgctgccagtgcctgatgcttggctcttgggacagcctcttttggtggcagagttccacagcagaatgtccagcagaacaatattacaggccacaaatgccagctatccatgtaatttacatttcctaggagtgcatttaaaagtaaaaagaaacaggtgaagttaattttaatattttttatccagcccaatatatctgaaatatcatttagcaggtagtcaatagaaaagaaagttattgagatattgtatattcttttttttccattctaagtctttgaaactggtgtgtagtttgcacttctagcccatcccagctcaggccagccacatttcaagtgtgcaagagccccacatggggcaagtggtcactgcattagacagtgtgggtctagaggttgtgggaggggggctgggaggaagtgaagacgggggaggaaactgagaacagaggaggaaggggaggcctctaagacctgagtgtcctggcctcgccaccaggctggggaagtaaacccagccttacccgagatacgcggcagggttagtcgtgctgcgctggctgtcccaactcacttgcctggggccgttttctcccaggataagcttcacacagtgcccagagcccaccattaaggtcagttctggctccaccacgccgactgccagggccctgtgcaggccactgaactctctgtgcctttgtggaaaggggacaaagccattatctcatgggtcaatgccaaaaatagagataagcatgtgttatttttctattgaaacaaaatatgttatttacaaacctctgaaacaataggggcaagcttaggagaggcttctcatgcacccactacgggcacgtttgcctcgctgcggttagtgcctactgtttgcagcctgggagcgtcatcacaccagagcccaggctgcggtgcacaggatggctttgcccaatatagacggtcactttgaggactgattggaaaatgcagggcagataagcggcacgcagtaggccttcatttaagggcagctagtgatgattcatgaggaggcgtggcccggctcgtaggggtggtcttgttgggtcagtggtctgcgtatagtaggtgggatgggcaatgaggagcacggtctgaacataataggtgtggtcagcagggtggatggtctgcacacaggtcggggagggctgggggggtgccggtgcaggtggtcagctgacagcagggggtggtctgtgggcctctggccctgcttaccctcttctgggcatgtccctccggcagcacatcaacaacgagcacatccacggggagaagaaggagtttgtgtgccgctggcaggcctgcacgcgggagcagaagcccttcaaggcgcagtacatgctggtggtgcacatgcggcgacacacgggcgagaagccccacaagtgcacggtgagtggccttctccccacccccgccgcagcatcaagactggcctgtcagccaggccggggggatcatgtttggaggtggctggccacaggcacacctgggtggggcagaccacagcaggggctctgggacaggagcctgttcccaccctgcctgtttgggtcctggaggcccctcgcctcgtgccgtcccagaccttgatggacttgctctctgggtgtgagcatctcggtaagcatggcaaaaatgtgtgggtgtgtctgtgattgtgagtccaaaggcatatctgcaccctgcagtttgcttggctgggtgacgctgggaagagggacagctccatagtgctctgcagagaaaaaaacatcattggtgattcagagcttgagcaatgatgggttaaaatggttgagggtttttttgtttgtttgttttttgagacagagtctcactttgctacccaggcagctcattgcagcctccacctcctgggctcaggcaatcctcccacctcagcctcctgagtagctgggactacaggtacatgccaccaacccagctaatttttgtattcttttgtagagatggggttttgccatgttgctcttgaactcctgggctcaagcagtctgcctgcatcagcctcccaaagtgctgggattcgtcttgagccacagctcccagctgagttattttttttttaagtgagctcaatgataagaccttttctatggtctcctttagaaggtcaacaggatttatgactatagttggagagacttatttttttaacacacagaaactgctgccccacaaatgcacacgtggtttcagctgtagctgaaacatctgggaactcctttttgtgaattcttgtttcatagattctgagacatacattttgttttcaccttaatatctctgaagtcagactgtcttaaaatcagtggtgtccaggatccaatgaaatatgctacctttgctggcaagtcagtttttttattgagaaatagctgacataccataaagttcacccttttcggaaaatgtgcaatttagttgtttttagtacattcacagatttgtacaacaatcactactagttaatttcagaacattttcatcaccccagaaagataccctgtactcattagcagccactcctaattctgtccttcccacagcccctcctaattctgtccttcccacagcccctcctaattctgtccttcccacagccctggacaattactaatctgctttctgtctgtatggatttgcctgttctggaaatttcataaaaactgaaatcatacaatatgtgcatttgtgtcttgcttctttcagttaacacgtttgcaaggttcacctgcgttgtagcatgcacgcgtactttctttctttttgtggctgcataatactccattgtatggatagaccatgttttgtttatgcattcatcagttgatggatatttgcattgtattcactttgaggctattatgaataatgctgctatgaacatgtgcgttcatgtttttatatggacagaacgttttcacttctcttgggtatgtgtaactaggagtggaattggtgagtcgtatggcagttgaggaactgctagtctgttttccaaaaacgctgctccattttacctttccacccacaatgaatgagggttctgatttctccaaatcctcaccaacactggttgttacctgtcttttttattctagccatatcctagtgggtataaagtagtattttattgtgtttttgattagcacttccctaattagtgattaataatgttaaacatcttttcaggtgcttattggccatttgcgtatcttctctggagaactgtctacccaaatattgcccattttgaaacctggttgtctttttgctgttaaattgtaagaatttttcatatatctggttactagacccttgtcagatatatgatttgcaaataattctcccattctctggattttcttttcatttccttgatactttcttttagagcacaaagttcttaattttgaggctgtacaattttttaattgcttgtgcttttagcgtcatagctaaggaaccattgcctaatccaaggtcacaaaaatttacctctatgttttcttctaagagttttatagtttatatagacttttatttatagaaatattgaatactggcactctgaaaaatttaaaaattaaaaaaagaatatatgtgtgtatagagagttttataatatagctcttccattgaggtctttgatccatttggagttaattttttttttttttgagacagagtctccctctgtcacccaggctagagtgcaatagtgccatcttggctcactgcaacatccgcatcccaggttcaagcgactctcctgcctcagcctccggagtagctgggattacaggcacgcaccacacgcctggctaattttttgtatttttagtagagacggggtttcaccatgatggccaggctggtcttgaactcctaacctcaggtgatccccctgcctcagcctcccaaagtgctaggattacaggcgtgagccaccacgcccaggctggagttaatctttgtacatggtatgaggtagggatccaaacttactcttttgcatgtgattacgcagttgtctgagtccatttgctgaaaaattgttctttccatttgaatggtcttggtatccttgtcaaaaatcaattgaccttaagtgtctgggtttctttctgaactgccagttatattgcctggatctctatgtctctctttatgtcagtaccacatgcagtctttattactgtcaatttgtaggaagtaaattggggcatatgagttctccaaatttgtcctccttttgcaagatggttctggctcttcagggttcattgcaacaagttattttcttaacatcctcagtagtggcaaaccatagccctttgatgatatgagctgtgagttgtggaaacagataaaaggcgtttggagccaagcatgctcaatcagactggtcaggaataaaggggaggatgggaggaatgagacagctcctgccgggtgtacgtgtcctcctgagggcggttttcatacatccattcaatgcaaccacagtatctttggaatagctgcagagcttcctgcaatgatctcttctttctccccttcctcccttcttccctctctccccacctcctttccttccttcctctctcccttgctccctcctttcctccttccgtcctttccaaaaatgtttcttgagtgcctagatgctaaatattaggaagacagcaatgaacaagacagaagattcctgctctatggagctggtattctagtaagaaggctgggtaacaaaatgattaagatcattataaatcgagccaaggggtataaaggagagaggatagagtgttgtgattgagaatatcagaaaaatgctctcagaggagatgacctaaaagattgagagggagggacctgggccaggaaccggattgggtgggggctgcagaagtttccagccagaggggtcggtagtatgcagaggccccaagccagaaagaacttagtggagtcaaagaactgaaaggagaccagcatgtccaaagtgaagatgagggtggccgactcactcaaggacttgaaggactgaattttattctcagcatgttttagagcacaggacaattctaaccgagagtggtactgggaaacagttcaaagtcatagtttagagtttaatgatatgggaatatgctgctgatttaaaaaaatagagtatgtaactgaatacttgacatgttcccaattttggttttaaagacatgtggagatgaattgcagactcaccagaatgaaacttacctgcgtgtcagcagtagcagcccctgggcgaccggtggttttcatttttctctttgtacctttcagccctttccatgttttcaggaaaggaaagtaatatccttaaaatgcatgcttctgagtgcgctgacgggttggagcagagcagagaagggggtggggaggaagcagcagccggcctcaaggttgggccccctggggtgccttgactgactgaaccgcctccttctagttcgagggctgctcgaaggcctactcccgcctggagaacctgaagacacacctgcggtcccacaccggggagaagccatatgtgtgtgagcacgagggctgcaacaaagccttctccaacgcctcggaccgcgccaagcaccagaatcgcacccactccaacgaggtacctctgcggggcatgcactgggcatgcacactggggccccactgacgccccatggcttccaggcatctgtagtccagtagatagccaggtgccccatgtcccgcccccgccactgaccagctatacatcctcagatacagaccaggactctttgagacctagacagaccggtctctttctctatgccacatcctttcctctaaaagatgccccgtgaggtcccatggcatactgaccctctctgtgcctcaatttccttatctccataataaatataatagtgccctccccaaaggccatcatgaggtcctcgagagttgaagttgaagcagggaagtggcccttctgatctcggagtgtttaacatgcatctgctccctattacttggggctgctgggtgggctctgcctccccatcctctagatgaggaaacgaagactcagagatgaagtgactttccccagtgccagagcagtgatgatccctctgcagctgtgaaaacatcctgggtcactgctccccacccccaaattccctttccaccacaagcaggtgttccactggggagcagctgccccactgcctgagggaagcagagcagtgctgtctgagcttggcgtttgttggtagccccctggcctgttggcttgggcagccagcagtgacatgctccagctgttagcgctgcctgggcctgccgtggctgtcagccccagcagatggggcacagagcagcctctgtctccctgggtaggcagagcccctatctgggctgagagaaccagggagaaagcagggcaagagccggtggcatcctggcccagccacacaattactgtcgctcaggcttactcggaaatgtatgtttttaaaagcttagacatatcctggaccccaaagggactttgctccaatgcttgtaagaagttagaggaattttcaaaggcatctgaacccctcagagtctctatggacaagagccagccttagaggggagtgtgtgtgcacatgtgtgtatgtgtgtttgtaagtgtatgtttttctgtagacgtggtgtgtggggtgtgtgtgtgtgtgtgtgtgtgtgtgtgtgtgcatgtttatgagtccaggactgaggttcggaaatcctgggttttttcaccccattactggatgacttggaacctgttcctttgcctccctgatcctgcctttcttcatcagagaaatcaggggtgctagtgctgtcagagggtacactgagctcgtacacttgctactagtactaaaaaccccactgccctgttcattgagaggcagcattgtgattacacgaggcacatgtgtccccagcttcttgtggcaggaccccccgtggccgtgtgcttaactgcatgaacaggtgcagacaagccaggctatggccaggctcctgcatggtgccatccacagagcactggctgcaaatttgacacagcacctactgacgttgccagctgggctctgctgaggggcgtgggtagcttcaggagaacagggagagcgccccttcagagttgatcctcgtacccctatccatgacacaggcctgcttctctccccagaaaccctacatctgcaagatcccaggctgcaccaagagatacacagaccccagctctctccggaagcatgtgaaaacggtccacggcccagatgcccacgtcaccaagaagcagcgcaatgacgtgcacctccgcacaccgctgctcaaagagaatggggacagtgaggccggcacggagcctggcggcccagagagcaccgaggccagcagcaccagccaggccgtggaggactgcctgcacgtcagagccatcaagaccgagagctccggggtaagcggagctgggcagcccagccacgcaaggcgactccatagccgtgcccagggccaccccttgccacggttgcgggctctgccctaaggcccccctctaggggcacagcgatatccctcctctctccaacttggctttcccccttcaccaccttgggcctcacatggaacctatcttgtccaggtcccattctgctctgaccaggctcctgctgggtgtgtggcagcacgctgggtgacagggatgccgccctgtacggtgggcctgcacagggcgggggtggcccctgcaagtctgcctttccagccagcacccaagtgccactgccagcccccactcctctgtcctgtctctgcatccccacccctctggcgtccactccttttgttctaaccacctgttctttgtctccatctctttttcctgactgtacctcccctaaggatagacggtactgaggtgagccaaggagctgggcatgtgtgggtgggctgggggagtgagggtggctggggagccggtccatgctgctgcctggcagagactcacctgtcagtctaggcctcctaggcccaggcaggtgggcccggacaggcacacggcagggcactgcaggtggggccattggccttggcagccggagtggaactggcaggtgtggggagcaggggcgccaggctgtatcagggacagagtgacagggaggcatgcgtctaggctacagaaggtcctgagggtcaaacagaaaaatgtgggtggcgccatggacaacacctagaaggtccctgctcccattaagcctgtgtcctcatgggaaggaagatcatgccttcccaagaaagctggaatttggggccatttggcctaacaatgagcccagaggtggtggtgcatctggtgcaagcctcatctgggcccagatccgagttctgtggatgtcgtccgagtggatgttgtccgagttctgtggcattctgcactgtgtacatgtgccatgagctccctgccccactctacctaacccagagggaagactgttttggggtggccctttacacaagggctgcatcccacaggtccccctcctggtcatcctttccctttcccacaacctgcccctggccttttgagatcatcctgtctggttgaagccaccaagtcagcaggcttcattcctcacctcatcagggtacatggctgttggtgggagtgtttaagtgccttcctttgtgccatactgggtgccttctgcacgctgcgtgctgtccacccacccactaactctgcaccggaatcagttcaggtccatctcatagttggggaagccaaggttaagagaagtgaagtgacttgaccgttttaagcaaacagactcatgacgctttacgtgctcctccgcaaggcagcttccttccctcaccctcagcccctcagggtgggcgagggtgtggtgcctgtgcaggcctagaggcaggaccaggtggaatctgataccctctgagtctgagccttcttgcctcgtcccctgcagctgtgtcagtccagccccggggcccagtcgtcctgcagcagcgagccctctcctctgggcagtgcccccaacaatgacagtggcgtggagatgccggggacggggcccgggagcctgggagacctgacggcactggatgacacacccccaggggccgacacctcagccctggctgccccctccgctggtggcctccagctgcgcaaacacatgaccaccatgcaccggttcgagcagctcaagaaggagaagctcaagtcactcaaggattcctgctcatgggccgggccgactccacacacgcggaacaccaagctgcctcccctcccgggaagtggtgagtaaaggcctggggtttgcagatggggcagaagagagtctggggcagcaccaactaggctggcacccaccaagcaccagtgctatctcaccggattcctacaggatcttaccagcccagtacagaaaaggaaactgaggctcagagaggtgaaatgccttacccaaatcaatggcaggggtgagattagccaaaggccatgctctttcaactgcaccattctgagtccttataaccccccaaaacaagcagaccctgcgcacatcatcctcttcctcacccattcattccttcactgatgaggcacttgctgtgggcaccatggcaaaggccctaggcaggagagccatttaattccagtcccaaaggagcgtatggttagaaggctgtgccaccagattcacactctactgcagaacgagccaggtaccaccaaagccagagcttagggtagagctgtgcagaggaaggagaaagcacattgagctggggatgagcagggaggacttcatggcggaggcagcactgtgctcagtctcaagaggtgttggccaggctctgagatggaaggcgtctttaacgagcatgtcttgggtactgactctgtgcctaggattgtgccgggctgcccactgtggtcaacactgatgtaccacctgctctcacttgaagggaggatttgttgtcccaacttgtggggactactggcaaatggccttgaactctcagccccctacagggatgtcctgggttgcagacagatgccccacccaaggtcaccccttcccagcagccccgcatgcaatgactggtcactgcaggagtgtaaaggcccagccatcaagatgaggctcagagaggtgcccaactcagggcagcactgaagagccattgggggtcctgggctccctgtgagatcatcctgggctcacgtctcctctgcccactcttgcagcctgtctttccttccatgggtatggacctcagggtactccctgtaataacctgctccttaaactccatctcagggacgcctaggtggcaccacctccacagactgtgagggtactgtgccaggagaccaacctgggccttcctgagctgctcatcccctcctctgcgtaactcagtcctacggagaggcacatttatctacagctagagaaactgagggccagagaaaggagaattcaaggccagacagataatggtaaagtgaagatagggacttaggcctcctggcttcccctcgcccacccttagcaataagtgccaccatttgtttacatattgctttttccttcccctttttaattgaaaaaccatctgctcactgggcacggtggcccacgtatgccctagctactccagagtctgaggagggaggatcccttgagcccaggagttcaaggccagcctgggaaatcctgtctctaaaaagagaaagagagaaagaaagcatgcatctcctgagtgcgctgtgttgcaagccctcttctcgggctccaggcccagtgcgatgactgagcacggtcaaagcaagcagccacccacccttgtcccggtgctgacccctctgctctcccgcaggctccatcctggaaaacttcagtggcagtgggggcggcgggcccgcggggctgctgccgaacccgcggctgtcggagctgtccgcgagcgaggtgaccatgctgagccagctgcaggagcgccgcgacagctccaccagcacggtcagctcggcctacaccgtgagccgccgctcctccggcatctccccctacttctccagccgccgctccagcgaggcctcgcccctgggcgccggccgcccgcacaacgcgagctccgctgactcctacgaccccatctccacggacgcgtcgcggcgctcgagcgaggccagccagtgcagcggcggctccgggctgctcaacctcacgccggcgcagcagtacagcctgcgggccaagtacgcggcagccactggcggccccccgcccactccgctgccgggcctggagcgcatgagcctgcggaccaggctggcgctgctggacgcgcccgagcgcacgctgcccgccggctgcccacgcccactggggccgcggcgtggcagcgacgggccgacctatggccacggccacgcgggggctgcgcccgccttcccccacgaggctccaggcggcggagccaggcgggccagcgaccctgtgcggcggcccgatgccctgtccctgccgcgggtgcagcgcttccacagcacccacaacgtgaaccccggcccgctgccgccctgtgccgacaggcgaggcctccgcctgcagagccacccgagcaccgacggcggcctggcccgcggcgcctactcgccccggccgcctagcatcagcgagaacgtggcgatggaggccgtggcggcaggagtggacggcgcggggcccgaggccgacctggggctgccggaggacgacctggtgcttccagacgacgtggtgcagtacatcaaggcgcacgccagtggcgctctggacgagggcaccgggcaggtgtatcccacggaaagcactggcttctctgacaaccccagactacccagcccggggctgcacggccagcgcaggatggtggctgcggactccaacgtgggcccctccgcccctatgctgggaggatgccagttaggctttggggcgccctccagcctgaacaaaaataacatgcctgtgcagtggaatgaggtgagctccggcaccgtagacgccctggccagccaggtgaagcctccaccctttcctcagggcaacctggcggtggtgcagcagaagcctgcctttggccagtacccgggctacagtccgcaaggcctacaggctagccctgggggcctggacagcacgcagccacacctgcagccccgcagcggagccccctcccagggcatccccagggtaaactacatgcagcagctgcgacagccagtggcaggcagccagtgtcctggcatgactaccactatgagcccccatgcctgctatggccaagtccacccccagctgagccccagcaccatcagtggggccctcaaccagttcccccaatcctgcagcaacatgccagccaagccagggcatctggggcaccctcagcagacagaagtggcacctgaccccaccacgatgggcaatcgccacagggaacttggggtccccgattcagccctggctggagtgccaccacctcacccagtccagagctacccacagcagagccatcacctggcagcctccatgagccaggagggctaccaccaggtccccagccttctgcctgcccgccagcctggcttcatggagccccaaacaggcccgatgggggtggctacagcaggctttggcctagtgcagccccggcctcccctcgagcccagccccactggccgccaccgtggggtacgtgctgtgcagcagcagctggcctacgccagggccacaggccatgccatggctgccatgccgtccagtcaggaaacagcagaggctgtgcccaagggagcgatgggcaacatggggtcggtgcctccccagccgcctccgcaggacgcaggtggggccccggaccacagcatgctctactactacggccagatccacatgtacgaacaggatggaggcctggagaacctcgggagctgccaggtcatgcggtcccagccaccacagccacaggcctgtcaggacagcatccagccccagcccttgccctcaccaggggtcaaccaggtgtccagcactgtggactcccagctcctggaggccccccagattgacttcgatgccatcatggatgatggcgatcactcgagtttgttctcgggtgctctgagccccagcctcctccacagcctctcccagaactcctcccgcctcaccaccccccgaaactccttgaccctgccctccatccccgcaggcatcagcaacatggctgtcggggacatgagctccatgctcaccagcctcgccgaggagagcaagttcctgaacatgatgacctagaggcccgagcgcctggtgctgagtgcacccggaggggtcatcgctgcccagagcctggggattccagctgtcttgtctttttccaaaaaagtgttaaataggcttgaggggttgttgcgcaatggccgcttcagatgacagatgttgtaagagaaggtttatgggcatcctctctggtcttttggattattcctcagaacaatgaaaaaagtctccataggacaggaaggaatgcaaaactcatttacacagtgctttccagcctttggtgcttacaggaccgcgctgttccggcttcttcacggctgacattcggctaacgagggattactttggccaaaacctttcaaaggatatgcagaaagatggtagggagcatttgggtttgaatctgaatgctatactggatactctgctccggaaagatgagctttttattctactacttggaaggaaaaggaattcctggtccacctgaattcctctatgaagcctaactcttgaggtctctaacataccttgtcatagaggaaaagcacagattatacctggatgattcaggagcacattctgattccaggtttggtagagctggctcttctactccgtaaagccgagtctgggactggcagcccatccaagtgtatatgaatgaataaagcatccaagtatatatgaatgaataaagtatgtaagtatcaccagaaaaaggaaagaaaaaatgtactccttggggcaagcccagaagctgccctggcctctccagaccgtgtttacagtgtttgcatgtagaatgtagcccttcctgaaaagaagacttgtttctaaatacctcggggctgctggagccgctgtgggttagggatggactgaggcctcgaggagtgagggtgcacccggggcccagcctcaggctgccctagggatctctcagtaggaagaggaagttgcgtgtttacccaatcctgtttctccaatgcaacgtccacccactttaccaccaaaaactccagggcctgacggcagcccggtcccccagcactcaccagcagcccagtgttctccaccaagccacagtgtgcatgcctggtatcctccggattcccttccttctgcccgctgagtcactgggcagagaatgatgacatgtgtaggtggtgtggttgggggtggaaaggggaaggggttgatcctcaggactctgagggagcatcgttgaattttcctgttcagtgtgaccaagacccacctggaaatggaatttggaactggcttcaggagacatcattcctgaacacactgtagggtgaattggtgcatcttccccaccatacacacacacacacacacacacacacacacacacacacacacaccccaaaccttttcatggggaatgtgtggcaaccttgccaaacagcaccactcagagtgtgactctgactgtgaccttggccttaatgaggaacttcttaggagagtttgaggacaaggccaacatcgtcatctgggctcgctgcgtcccagcacatcaaactctgtccagagacaaggccaactgcaaatgaaagccagggaacattgctaagggtctgtggctctgtggtggtgttcatcgccttcctgagataggatttcccttgccagtcccaacctgtatatattctgtacagaagacatccctgaatatactgtaggtgagtcgtccagccaaatttatatctccaaaacatttttagctttttctacatgctatgaattgagatgacatgctcaacttgtaaataagtctttttgtacattaaaaaagtaattttttcataatttatcttgtctatctgcttcccccttgacagtagttaatgagaacctgggcagtaaatttggtgcattcgagcagaaattaggctgtattttttcttaacagtgtcaaaattgactatcccgcctttgccaagaaatgtttaatgctgaggcatttactggctgtttgtttgttgtctccttggggccgggcagggtttgacatttcacagtgaatatctgactgctcttccggtgagccactctgaacatctatatgcattgcagaccggggtatagacccaaacactcctagggtcagaaccctccctttggtgggccctctgatggagcatatttcatcagggtggggcggggtgagatgggcaaacccccaaggctctggtgcaggtagaaggagtcagggcaggcaggtggcacctccaggatgcccagcagttggccttggcaaaggggcccatggggagcaaccacgagcaggggctctgagctctagggggccgcccagcaggtggacagggaaagcctgggtccagtgggcagacagtcagctgttggcccctacagtaaacctcagggagcccttgaatgagtcatgaggccccatctgggggtagggccagagacggagcagggagcagagccccaggactgaactagaggggaagagggcactttctaagggccaggcacccgggcctctgaacaccgagcccagagccctttaccctctcctctccaggagagaagccttagcacgcaggctgggcagtgtggacaccaaagacacatgggacatcatctttgcctggaaggcatgagacacatggaccggggaagggttttgtggtcagacacttgcaggaaacccccaaggagaatagaattgagcagatttcctttccgcaggcatcccacagcctccactgtgcatcagggagccaccacttctctggccaacatttcctagtggaaaggcccctctcctccccaaggagcaatgtcactcggcgagctcccagggaggaagtaagcatgcacagctctgcccttccctcctcttctttccaaagcccaccttcggggctcacaccttctctgcttcaccacttgttaagcctctggaagcagctctgccctactttgtggagagggtgaggcctaatgttgttcagtgccacctgaggttgcacgagccacagaattaagagcccactgtggccattcagacgagccatctcctctgtgtcaggtaacgatggccacagtcacgctgcataacaacatccgtgaaacctcagcaccgtataacaataagcatgtagttagctcatgaacctgaaggtctgaaggttggctgccccgggtcgggcttgcctgggctgtctccaactgtggctcagctggggtcatctagtctaggtggcttggcctcccccagtgtgacacatcttcctcccaggaccaagacactagcaatgacagaagcacaggagggcaagccagcagctgcaggtccccaaagcaagtcacgtggccagcacccatgcagtagggaagggtactcctgcggaagtgagcaggagagagcaaatatttcccgacagtaatccagtctaccacagcctgccttcctagagacagttattcatgt

SEQ ID NO: 227 - DNA, 279070 bp, Homo sapiens
  source 1..279070: mol_type = genomic DNA
agaaaaaaaagcctaaaaacaatttagactctattactgttttgaaaattgtcaagagcttgaataactaggtagaaaaggcatgaacaaggtctatgttagtaaaatgaaattttagaaagtaaaggctaatatgaaaggaaagacgtgttcagattatgtttggaatagtaaatgtactctaaagtcaaaccaaaagggaagactgccaagaaaataagtagaaaacctgggagggggaaaaaaaaaggacaaataagacattttggcagtaggtaaatttttgcttctcattttagcattctattatattcttgtttgggtaagatataatgtctttacattcccaaaattacttaaaggaaatctttatgaaataacagattgtagctccacctttttacctcaaactctgcttcctttgtatttactgtgcaagaggcatttttacaaacaaagctgtgagccccatccacccccagctcatgtggattgaaggagtgcacatcacccacctcgttcctgggggtgtcccttccctaagtttcctttctcttagcctcatttctctcatttcttttattttgatttggtacatggcatgtctctttgtgagctgacagtttatacctgaggcagggcataaattcatattttccttatttttttctggattcatttggataccttatataagggatctagttacaaaagcaaagcatcttggattggatggggggaaattctccccgagaatcaggaaagcatgaagcatccctatggccaaagaaaccctgctggaggacagggaacatacaccccccacaggatataaggcctggggaacacatgctgttgtacctgtgtgtgtatacatgcatgtgtccatccttgtagccttgagatacccacagccaggactcctgcccttcccagaaacaattatcctcagctgatggctcaaaagacatgtactactacttagaaagaggaagggaaggcttttggagtggcttacggtaatctggagaataatattgcacactgacacaagaaaaacatgggagacaatttattctggctgaggtcagttactaaaagccacataaagtaggcttctatcgtgtcagattttctgttgacatgtggtagggcatctctgaaatgagaggataacatacaaaagagggacaaattaagttgttagacgttaaaccccatcaccatccttcctcactgaatttagaaagcaataatataaagaaacacaataattgttgcaactggtgtgccccccgggtacacatcctcaaaacaccatgagcatgtatgtatttgcatcttattctccagtttagggctaaggaatctggatctcacagcaaaagtccattcatcttctacgtgaggggtctggatccagctacaggctctggatgttttcaaagaaagcaatctttccattcaactatgcatttaataaacaacccaataaaaatttccatacaaagaattttttattgacattgtaagaaacatttttttttctttgttacaaaaggactaagtggttctgaaagcaaaggtagagttcatctgtggctgggctgcagcccctgggcttgaggtgggcgtgatcacggggaatgcaggcttgtccgaggaacgcctgggccagtcacatctgaacgctatgcctacaatacttaaatgtatttacatgtgtttcttttaaaaaaaggattacacattttattttttaaaaaaatctaaaaaaggtgaaaaaaatgaacttgtattttattttacatgtctgcaggatacacaagggtaacttgtcagaagagaacatcctcctatcagttcaaaacaacacatgaaaccaggatacaagacagcctcgactctgctaccaccgtgcgctctctggctggtgcacacacagccttggagtgctgattgggcaacaccaactggtccctctcattgacaagattaacataaaataaggcacatacatcgcaagaatcaaaactttgtggctcaagaggaagagccaatgtgtgaggagttgggaggggttaactttttcagaaaaataaaacaaaaatggttagaaaacgtttaacacagacattaagcaggagtagaatgtgtgagcctgcatgttttagaaaaggcaggatggtgacactagtgaggcggtcctctcgctctaaaatgcataggttagagaaatggagagaggcttggaggctgggggtgagtctcaagatatgagatgcctagcctacagagatcccaaaaggatgtcccaaaaagatgcttctaagtgacctcaaaagaccttccttccactggactgccacaacagatcactgaaattctggaggagtatactttcttcttcctccctcctctcctctgtccttctgaaatttccatattgagagaagccaaacattgagctgaaacttgcatctcctgcaaatctaaaagcagtagaaaggaaagcaaatataaaaaaaaaaagaaataaaagaagaataggggaaacccagaaaataacctgaaaccataggaaagagcagaagcacaagacaacaacagtggtgggccggatcactgtgcatccctccaggaaggacaaagctgatacaggaaataatggtaactgagaaatggaggttgcatccgagaatactactggaagagccctctgatggaggaggtcagcatggtcccttccacccaagctcctttcttaggaggagtggagaacactcaggccccatgctttgaaaacaagagttggaaagggattgaaccaaaccattagagcacacaagataagactggagatttggagatttgtggaaaagtgagactggatctctgattctgtgacaacattatgccttgtttcagaaacacagagaaagtcttgctttttcaactgaaaagtggtagagcctctactttcctatgctcagatcagtagttctcttttgttatggggctgttccaaaggagacacatccgttaatttcaaagaagacttacatgggggagaacagcaggcatggaaggggaattgcagtgtccctctgcttgtctcaggaacatctagttgaaagcaaacctaatagtcttagccaaagtccccagtggcaaatcaacctccatgcggagattcttggtccaaatgaaagaacataaacatgagaaaagtgggctggtcttaacactctttctattatctaacactttattttacttgattttgtctttctactgtaatttaaatggcaagattaaaggggaaaagccacataattgaattatcaatcacttgcagtaaatccaattccaggggtcaatgggacagaatacagcaggtagcctgaggtgttaatattttaacagtttatataattttttaaagcaatatgctggaaaatccatgtactctttgtgcacacacagtatgacttttatgtgtatcaaatgcacgtggggagtagctgcacttcaaaaatctttaaatgttttaatccaaaacaaaagtacagatccagtccacattaaggactaactgcatgtaacatttaacttcgtgaatggatgcagcattcaatagacagggtgtgaaaaaaggcatccacacagctactaaacatcttccctagtgctctcaaatactaaaaatggctgaagcaatttattcccactatgtgggctttctcttttacaactaagttttataaatccctcaaaataaggtatttagaatggaaatcctccctcactatagtggaattaataaatgttactgatacagccgcttgtggggttgtttaaatacctatatacttagagctatatataatcaattctcagttaaaatgggaaagagatggaactaatcaacaaacacagcaactcataaatattcccccaactaattctacccaattgcttcaatctaccatctatctaacttcttaccagaacagataaaagtagcaatgtggctgagtgtcaccaactgtccgtcccttctctctaactgcagtgcgaaacagcactgaatgttcatgaaggtagtgggaggagaggcaaatgtgataactgagaatcgaccatacagacatagcctcccccaaagcacacttacagacatgaagagctgaaaaccaaaactgtgagcgcccatttcatttataagagccccacgttcccatttctgtttaactgtggaatgccctgaactgaattggagatggggggaacatcaatattctgtcatctatgctacagtgcacccacaaaagtttcttaaactagctatccatattctgattcttgtgcccaatgtgggaattaaaataaaaaacagaaaccaaaacacaaaacaaaacactgagcacatgtaaaggagaattttaaaagctggaagtgtaaccccttggtcacaagcacaccaactcctatttcctttgagcaacagcaaaacatgtcaaatcctttaatttgactgctcttctaaaagaaagaagaatatgcacatcacaaatttacatcggtttactaaaaagggggcggggcttacagtttttttttttttttttaaaaagagggtggtttgagtgtaacaatactgattcaaaactgaaatggaagacagtttctccctagaatactttagggtttttcagagtccttttccataaaaggaatataattgaaacacatctcagttaggtgagatgagattgctaaaatacatacagaactaaaaaaacagccaaaacaaagtcagtttaatctcttcaactcctattgatttccgttggttgcagtctttttttcctaaagcctattgcataactgcaaggaatttgctttcttccgctagggaggtcagcaaagaactcatgtccccgatagccatgttggtggtgctcatggacagcgctgggaatgggagggacgcccgaggcgtggtgaggcgggaggagctatgggaaaggttctgaatgatacttgggctcagggcccccgacatcaggctggagtggtccccatcgtctatgatggcatcgaagtcaatctgtaccccttccaggtcatggctgtcgaggctgtccactgtgcttgtcacctgattagcacctggggaaagtaactcagagtttttggcgctggtcccctgtagcaggcagctggcgtctgaaatagagaatgaaccagctttcgtgtcttgctgactgaagcccacggtttggtcatagaactgaccagagtaattctgcagattagagcacagcggatggggctgccctttcatctccatcttgataccattcaccctgcaggtctgacttgtgtcactgagctgtcctgactgcagagcaaggctgtccctcggcatagcctggcgcctgctgcccccaaagctggcacatggctggtagcccctgacaactgccaagcttgacggctggctgcccatgccgtgagcccctggcaggcagctctctggcccttggtagatgttgatgtgtgaggtagcactaatctgcccaagcatctgctgaccggggcggcctgcccccgggtgctgcatgctgtcgccgaggagctggtgagccaggtacccctgtcccactgggtcctggttctgcatgccattcaccatgctgccagctgactcatttggcgctaccggcaggccgaaattcagctggcccccgctcccttgcatgggggtgctcttcagctttgaggcttgaatcccggcaccacaggcaccgtcgagtgcaccaggggccactggctgcctgttgagacagttcccatactgcggggccttacagggctgttcatggaaggcgtttccactggtgccacttccggggctgttgtggagcatcaagtgctctgggccaccgtaggggttgctgttctccccgagggtctgatagcccccagcaggcccgctcctcaaggggttctgcgggtggacgaccatgccgttgcagaacccaaaggcgcgagtctgcggcacagcgggccgcggcccacacttgagcttggaggaggacaggtcggcgcttccggagctgacttcgttccactgaatgggcaggtcggttttgctgccctcggggcagggctgctcgagggcatggaactgctggccagcgtggctgtctggcagcccgggcgcgtcaaagtcaccgggcccgtggggcactttgctgtcgtccgggagggcgctggggaagtgctgctcgtaccctgcttggttctgggaatttaaatactgcaccacgtcgtccggcaggaaatcctcatcgttcaggttggcatcagcgtccatggtcagggactccagggtgacgttctcggtgatgctgggaggacagggggacgagtggaagtttcgggactggccgccctcgggccgcgtgtaattctgaagcacgagactgcgcttctccgcggacgtggccatcgccggggggttgcagctgctgaggctgctgaagcgcggcacacgaggcagggccaggccctcggagcctgtccgcaccgggtcgctggccctcctcacgccgtggcccggcgcatcgtgcggctgcaggtggcgccgcccgtagccgtgggctcccccgtcgctgcacctcctcggggcatgaactggaggcagggccacgccaggctcgagggcatccccgagcagcgccaggcgcgtcttcaggctcatcctctccatgttgggcaggggcgtcggcggcggccctcctgtggcagccgcgtacttggccttgaggcggtactgctgggcgggcgtgaggctgagcaggctgggcaggccgtcgctctggctggcttcgctggagcggcgcgaggcgtcggtggagatggggtcgtaggagtcggccacgctcacgttctgcggccggccctcggcctgtgacgcctcgctggagcggcggctggagaagcagggcgagatccctgaggagcggcggctgctcaggtaggccgagctgatggtgctggcgctgctgtcccttctgttgagcatgttcagcatagtgacgtccaccccagagaggtcgcttctgcccgggagaagcgtcatgggcccacccaagctgcaggtgttgttggactgtgtgcctggagacagagaaagggagagaccatgcggagatgaattcccttcgagcatgacttacaccaggcatgagcaacccttttctgtaaagggccagctaggaactatttctggtgtcccaggccacattgcctgcctcacaactactcagctctgcagtgtagccccaacacggccacagagagcagtgagcaagcaagcgtggcggggtgtccatgaagcttcctttacaaaaacaggggcggctggagatggccgcaggctgtagtttgctgatgcctggcttaaacaaaacaataacaactccctcgattcactgaagcccctccccaagcgctgtgcaaggacaaaaagaatcttgtgatggtacacaacgcttgagttccaggcaagtccccaggcaaaggtactccacgagtttcacattcacgctcagggcgtcctgttcatgccacatcctaccaacaggtaacacctgtgttggtgcaggcaagagcttcaccccttaggtgctctcagaagtgtaatctcagaagtgcaaactgacctggggactgacagtggggagggatttctgactttccttgaactgggtaaatataaataaaagtggctgctaacctcgtggttttaaattttggaaaccagagacagagttccaaccacagatgcctccactgctggcattcccttaccctaatctaacagttatgatttcaccatcagaatatgagtcatgcacagtcacatttttttctcaatattatcctgttcctagctgtttttaaaatatggacaatcccaaaaggcaacttgaatgggctaaacattaacggatggttacagcgtcattttaggactggtggagaaactagcaaacataaaactgagggcctgcatttaaaagaacagaaaaaaaaaccctgagcagatgcatggtctgatgtagaactcaccatttcctatgagaggagagaccgcaggggctttagggggtagaatggggttcagtcgcggaaacattccattcacttgttttagcctttctagttttacgtgctccatccatttggtccctgccgggtttctcctggcttgcaaagcaagggctgtggttgcagtggaaatggttgagtccatgattggggtttcatcgatggcactgaggtctcctatactacctccatcggtcagaggaagctcgagcccactgttggaatagttgctgatgggggactgttggctgctgcatgaagactgaccaccagggcttggctgagatgtctgttggggtcaagtggaaaggaaagaaatgtcaccagggagggtcaaggaaagggagccaataatgagagctcatgcatatcgagatcttcaagatcatcagttggttgaatgagaagaaaaactatgttctggtgaatggaagctggccacttttggccagaatgacggatggaccaccaggctgatgggcaacaggaggcaatggaaagcagagaatgctagctgcagtgtgactggcatggtatcagccatggaatcctgccccaatcgccaactctgcagacatacttcctcggttccaatcccatctccaccactttattctttgggcacattacttagccactctaaacctcagtttccttatctataaaacagggaccatttatttcagggattgttgtgaggaattaagtgtgaagcccagagagcacacaagtataaaaagacctggataatagcaattggttcacaggatgttagcaattattatgatcccgggtggttttagtcttgaggttcattttgctcagctgaaacataaatgtaagatatgcgccatcagcacacattacctcctccaacaagagcccctctaggctgttcagggctggttagccaagctctttgtaacctctcctccctccttccacattttcttgcttttgtagaacctcaaccaaggtgtcagtaaaagcagttgagagaggtaaaacttcaatcacttagcttgtgctataccaagaaagaaagaaagaaagaagaaagaaagaaagaaagaaagaaagaagaaagaaagaaagaaagaaagaaagaaagaaagaaagaaagaaagaaggaaagaaagaaagaaagaaagaaagaaagaaagaaagaaaggctgcagatcacagccgtcatgagtctgtagaatgatttcactgttctccttagtgtactccctaatagttcactaggaggattaggaaatgattccctaaccccaaccgagtagactctataagacaatgctgcaaacaatggaatcttaatctagtccaccgtagtcctcaatcagggaaagtactgcctcctctcgctcccagggctcctggaaattcagggtgcccaatatctggggattactatataaaatggcctacaatgcacaggacagtcacacagcacagaattgttccatctcaagttccagcggtgtcctggttgataaacagtcgaatcctttttgtacagataagaaaagtgatgttcagagaagtttagtgactgcccaaagtcacaaagtgaatggtgcaactagcctggactcctaggccggctacttccatgcgtctgcagcgccttcaccagtgttactataaacacggacagcagccgaaagggagagtgctttagggaaagataactacactcactcggttacagagtactgtagtctcaggtggaatgcacagtgccaccaggaagggctcttcgcagtggaaccctttcacttcttctgctatcatggtacatacacccaagcaaatgaacactttctaagtgagtgctgcatggtacactaactttgtcccgggcaaccaagcagagccaaataagttatacaaatttgatcgtgagtatgtgaagccttgcttaatttttggcctcagcagagtgctggagtgccagaccacctgctccttcctgaggtacttgtttccagagttttggatgtctttgactcctggactgtcaaatcagagtgtgtgcagacatgaacttgtgcatttgtgcaaacacacaggcagacacacttcatataaggcacaaatgcactcacaattaggaaattgcttcaatgagcgtccacatttaaatagagattacattgctaacaacaaataaagccagatcttcctcaaagaaggtggtgcacatctggtctaaggatgaatttgcattagtcagtacaataatgagtctttcagaacatctgcttggtaggccccagtgtgatttgttatggaaacctagacagatagaacaatgaatttcaccaactaactccacatttttcacatgctgaatgttgaaaacacattgcttctatatttgaaacatatctgagtaatgttcactaccaaaagtatcacaaaaccacaaaaactaaagaaaaattaacagaaaaaagtaaatgttaaaaaaatgaaaacaaaacaaaaaggacagagaagccaaaattccctcaccttattacccactgtccttaggaagtgagaacaagacatttaggagcattagacagaagagatgttgcattaataagaaaaaagaagaaagaatttaatttatagcatgatgatcaaatcaaagacatgttttttaaagaaaagtagaaatgtaaatttcatgtttattagtaaatgtctgtgaagatacctacttttaaatgtgtgtgagcatatacacacataatatctgctgtggaaatgtgattaatttattaacctcactaagcctcagcttcctcaaaatatgggcatagtcttgatctccatggtttcttttagtcctatggttctaggttggtgccaaagtaactgtgggttttgccattaaaagtaatgacaagacccacaattacgttggcaccaacctaatatgactgaattactttatgaaatatttcacacattgggacatctcaatgttgctgagccaaatcgctgtaatttttatttctaccaattttctttttaaacaatgggtgtttgaagagaaaatgacaattttcttgagctaggaatgtacactaaaagtagaagagattttgggttcttggaatatcccaagaatataaatcatcggtttcatgacataatctaagactgcaaattaactttctttgttttgttaaacacgtgaggataaaccgttgaatgttctgtacaattattatacaggtaggctttattttaagaatagacatgtgctccccttcaaaaaaagtatataaaacacagtttatgaactgattaaaatacagtgatcaaccataatgtataaacatcttattaagatacttttttaaagcaaagtacagctacccactgataaatcatgataaatctgcatagctgatttgtgttatttttggctagacttaatgtcactctctaagactcttaagaattcaaagacaaactcagtaagtcattaaaacatagcttctcaccgtctcaatggtaagattgtgcattatttcccacccacacgtactgtgacatcactcatgaattcataggctctccatccgatagactgctctaattttaagaaaatgctggctttaagtataaatctgtttgcctgattgtttccgtgcatccggcagtctgagcatgaaacttctctctggtacacttccttcacaggttagagagtgacagcccagaacccaatatatttgcacaattaaatccattctacgcatggccagatgggctgaatctcctctactatactatctactcttaatttttcttgttgtctttgaaatttttaggtgttttataaaatcacattcatgaagcgaagtcacgaactgaggtttgaaagaagctgaaagagtagcagagcccacatgtcctattagtctccaaacacaaagattgcctactgaatcttccagatccctctctcatgctctgccttactggttcaggcccaactgcagaagtggtctccagtttacccagtttctagactggtactggagtggtttcctcaaaaaacaagaacaaaaaaacaaacaaaaaaactcacccctgctatgctgttcccctcccacccctgtgctcctctgcctcctcatcctcctcagctcttccctctggagcactgaactcctgtcccatggcttcctctgccccgactgaccggcagtccgtccctctcctgaatcctctttacacagacttgtgtgtaagcctccatcacactgcacggtatttgtttttcagtctatctatcccactggactgtaaactcctaaagaatatgggccatggcctatttaccttggggtcaccagggcaaagaagacagaaagcatgtttacaggaagagtcaatgaatgattttcgacattacagacacgctggagagacagacagtcgtgtctttcttccttccatggcacagtggtatggttctgggagggattttaaaaatcagttaggaaacctggaaactctttttctgagctgatcgacttcacgtaagcaatacgggtcactgccctcatcgcctcctcagatcagagacagcctgacacagtgaggaccgggaagtcctgtccctctatgcaccctacctggctcttttaaatgggcctgctgtgaagtcagaaggagagtgaatgacataccattggcttctctgccttgacggttttcacctggaggcattcttcccgctttgaggtagtgttgctgaggtcctgctgctcaccaagggctccctgagtcggtcggccaggcgacctggactgtgaatggctgccggaatctctcgggggtggcggccgaggatggatgtcccctcgctgcttcttggtgacatgagcctctgggccatgcactgtcttcacatgtttccggagggagcttgggtctgtgtaacgcttagtgcagcctgggattttgcacacatatggtttctgccaaatcccacaagaacgaggtaagagattgttatgaaagagactatgccccagcccaaaagtcctttatggttgctcattacatttttaatcctttcaaaacactttcacaaggctttgaggtgttcagatacctctaggaactaatagtttaataaggccattagaacactgttccgtgtccatagaatttagctttaatagattatggcttgagagagaggctcagggagaactaagaatgtgtaaattgccttgatgttcttggaagcatttacactgtgagtgagaagtatcacggtgccataataggcactcaatagatatttgatgatgatgatgatgatgatgacgatgactatgaagatggcttaaaagacacccatcatctaatcaggagaagactgcacacctttcagaagagattgtgtgacaaagttttttatggatgtcctggttgtgagatctaatatcactctgatccttttgaaaatgtgctatttatgcacaggcataatttaaaaattgccgatggcatctcccatgttagatgacactaaaatgtgctcctttgggtagcattacaagtgtggggatgttcagggctcaaaatagccagaacctttctgctctttgaagttggaaagccctgttacagactgtccatgaatcctcatcataaactgcagagggctgacggatgttctggggaccaggatttctggtctgttttcttctcctcagtgaatttataactaaggtctataaattatttcatgctaatttcattttctatgtgggtcagtgatcaagcctaaggatacagtcataaaaaattatgcggatgcttatataagcggattattttctgaaatcacagaactgctgacctttggctcatgaccaacatcggatttgtgagtttgttcacttggcttaaaatataatatacgcaagaatgctttcatgaatatatatttatatctatgtatagcagaggatgagcttttacgtaagcaagcgtcatgaaaagcaggattactataatgtacctattatatttaaaaggatgccgtgtcttgtagaatgtatgtctaaaagatgctttttcactaaaagcccaagaacagactgagtgctacctaaaatgctgaaatgtcctaatgcagtgaagcaaagatcctgaaactgagaggtttcacctccaaacctgagactcctttgggcagaattgattcccattaactatgaattacatctattcaggagcttgtgtgatttgcagcatatatatatataataagatgagcacatcaaattctatgcattagggacaaaagactggctctgataattagtgccattaccttacagtgttctgacacaggccctatgcttgctcacagcattcctgtgacaggttgttccatcaacaggcagactgggatatatggggcagaggtatggagaccagaaggagagagggagcacaaagcctgcatgtttggagagctactcttcctgtaaatatatggatgtacattatgggttagcttagaaccaaggacgcagccaatatgtaatgagatacaaatgtgtcggctcctgcacttccagaaacaacagcccatacaggtgcacctgtgcccgtgtgcccttgtgtgtgaacatacacattatctacccacaaaaattcacaaattcacaagaatacaggttcaggaaatgtatacctcacaacaacataacataaacaaaatatattaacccttcacacaacttttgcccacaaattttgttgtgatcagtgactgaaataaaatataattagagactaagaaaaatgttctcagacttactgaagtgcaagattctgcaagcacaaagttgcatacaacaaaatttaatcataaggaatacaaaatctgataggaaaaataagaagatgcaatgatctgtaatataaagtgtgaaagctatgtaaggatatagacagaggagggatcatttttcagctaggataatcatgggaggcatcagttattaagattctatatctgggcttaatgcccagctcacgggattatcagtaagtgctaaattagatcatgtacatgaagtgcttaccaggatgcatggaacatagtaagcactcaatatacagagcttttattaggagtcattttacttgggatgccaaaaagaagtgtcctcagcaaaggtccagtggcagaaccacttcatgcacctaagcatggcagtgcacagcaccagcttctggaaggtttcattcatggtcatgatagtgagaggtcaggactagagggatgagcttgggccctgtgagaactgacacttacacaaccttagggagtctcaagtctccctataggaaagagggagccattgcagctttctagagagggaggttcaaccgaatcagagctcaggaaacttgtttagcggtatctttgggggaaaaatgagctgtctgatctggagtaagaagtcctgtcagagctacggtcagtctagcagccctaaatgagcaggacagccagaggaacagagaagtgccagcaattactcccttcccattacagtccattattttcttggccacacttagaacagcaaagggcttggcacataaatagctttaagtatttgttcaatgaataaatgaagttgcaaataagagaggaaataaatgaaggcaaatcacttgattcatctaggattgtgaaattgcacaaatctggatttcctggacaaacttagttttgatgcgtctgaaaatgtccatcagtcacacacagggccaaagtcttgcatatagaagagagaagtataatttgtttgtaaatatgtctgtgggtagaattttaattatgtatttatgataaaagttagtaatttaagtaaattgctcaagtgtggtcaatgacattactacccaagatatccttatcttttaatcttataacaaacactcaactctcacacaacattgcactttttaccttggagaagaacacaagctcaactacaccacaattaaagcaaacagacatgtacaaatattttaggtccataaaaagacaaaaaagcttggtaattgtctttatatgtgtgcattctgatcctaacataccctctgtccaaacttctccatgataataggagacagcattggcctaacatctataggaatgaatgccccctaaatttctagtcaaaattacacttaaatctatgaaatatatgaaatacattctgttaagtcaaaaccccttaaaattttaaattgaaatataattcacatgccataaaaataatccctttaaattgcacaattcagtggcattagtacattctagacattgtgtaatcatcaccattacctaattccagaatatcttcaccaccccaacaaaaaaaccttgtatccattagcagtcatcactattccctctcccctctgcttttggcaaccactgatctactttctatctctatgtatctatctattctagactccctaaaattttgtacaaaacaagtgtaatagattatattccagctactgcatactgtaaaagcatttttacattaaaaatggagatgtggcatctttaaaatgtcttcaaacagttagaaaatgagattccgaataactccagtttccatgaccttttcacacagaaagttggtatatatatgaacttacatgtgtgagtttatgagtgagtgtgctttttacagagtgcagttaatccctttagagatgtttttgctctgtcagtttcagctgaagaaaacatggtgagaaccatctttgccaccttaaagccaaaagtccactgagcagaatggctcactttgtttctatcaagattctctctgcccagctctctgtctgaaagatcatgaatgtgtttgacctgcactggtgagatgaaatgacagccactccagggtctcatgtgtgcacgatgttccttctctaacacatttcaagcaaactgatgacacgctgtggtgctgaactatgtctcatgttaacaaattctggttagctatcctatttccactcaaaatgtggggagtccttttgttaatctctcaatacattcaagagaagatttcacagacaagccagaatttgagctagacctccaaggccaaattggaagtctgtaggaagatgttcactaaaatgtaagcaatgaatttggaataatttttattcttatgcctctctacaatttaggggggatcgctacctaaaaataacagtaacacaacaggaatcaccctgaagctttactcaatatgttttcttaagtaactgcctagaaagtattctgggtttctgagaccattttccaagatcctttggaatttagaatgtctgaaaattgcatttagccaaggctggttgctctgtaaaaatcttttttgatataataccatttgaagataccacttggaggaagcaaataaaagtggatgacttagcaggaagctgtcagctgtcaacatgctacttcttaatatatccttggggcttatggggtcatcctttgcatggattcctgctattttgggcagcgtgactggctcagattccaagtcaaatgctcccactgtttgaccagtaggtggcagttcaaaacaacatgaaactagtaagttcgcaggggttttaagaagtttcctcctcatctcttattattctccaaataagatccagtttccagtcccacctaggaagctcaagccttcacctgcaggggcagagcccctcatgctgggaatggccaaggggaaaacaaaacagaacacactgcgccttcccatgtgccttccccgggatagttctttgtttccttatgcaagctccatgcccactgaggatgcttacctcattggaatgcgttctgttttggtgtttggcgcgatcagaggcatttgagaaagccttgttgcaaccttcgtgctcacagacgtatggtttctctccagtgtgagatctcaagtgtgttttcaagttttctagtctcgagtaggcctttgtgcaaccttcaaactgaggacaacaggtaaatctggattactctgcacaatggcaacagcagcttatgcctaacacgccctccaagttgatgaaaaactgatgtttcaagggtcagcagcttttcaaaacccaggaacaaaaagtccactaaactctgcatttattgggattcagatgtagcttggtgtagttccagataaagagttttcagtgccagtaaaagtcctgaagtttttttttttaatagaccgctcaatgtggacaatgggtttcattatctgctcattgatctcctcaaattcccactgatttcagattcagcacaaagttcattaatatagctttgtgtccatacaaagacatggaatttgatcatgtttgtaaagggcctttaagatgtaaagtaccagggctcagcgtgcccagtgcgcctcgtgggcacctcagtgaagaatgcacaaccttgcggcacccccttcccattccatacgcctatgcctgaggactcactaggaaaggaagggaaaactttaaaacctcgtatagggattagctgttttaaaagtcaacttcaactctgtaagttggaagctggcacttccctttgccttccaagccccgtggtaccataagctgttgggctgcggccagcagggtggcccgctattcattcccagtgccagccaccactgcccccttgccactgtgcagagctgcgctgtccaactcagtcactcaaacaccgaggcatttatcaccagacaatactctagtcctcttctcttgccacccaaccacgcttcccctgagctggtgtcatcagtttgcacagctcttatgagtatggggaaggacccaagtgtgcctgccacccacttctgtactcacagtgcatttgtgaggcttctcgcccgtgtgtcttctcatatgcactaccaacatatactgggctttgaagggtttctgctctcttgagcagtccagccacctgcacacgaactccttcttctctccatgaatatggtcgttatttatatgctggggtttggaaaaagagagagaaatcaaatggaaacgtattcatcatttctgaaggcgacagaagaaaatgcagaaaataccccaatcttaaaaattctaaagaccacaagaataactttaccatattacagattataaaaattccagttagtacacttctcaagtaaatttgcttttgctaactgtgtatgcatgcttcctaaccagtgggagtggcaagaccgggatggagcctggcattccaggaaatatactacagtacactggccatctgaagagcagagttcaattccaggtttgggaccagctagttatgaaatgaggtgagccactgttgacctttctgaatctctgtcatttttccttgccaaggctggcgattgaggctaaacaactgcagagatgttctccaactctcacatgctgggccatgggttagcaccgcggcttaggcttcaaaaagggaaggcacacacagacatgcacaattccagaacaaaaaaaccaaaagcacttgcaaatgaaactttagctcagggttaatcagactgcttcctgaataagaattgcagagaaaagaattatactgaggaagaggactgtgtggtcatcaacaaataagttagtctttcagggccttggttttcttcttgtagaaaataaatgactggattcactagttgctaagggactttctagctctaaaattctattaatacagtttttaacataaagatgaagttctctgaattacttaccaattcatggttttagaatcatttaatttcttggattaatacaattaggaatcattagaaacctactgcagcatgagaggaagagaagcttcttaatttgaatcaaattaaggtcaatttcaacaggttgagcatactatttcaatgtccagctatggactactgaagacatttgcatcctaggttgatgctgttggtctttattttctggtgattctacattttatttgccttaatttaaggcttgtgggaacactttctgaagtatacatagaactacatcaccaaaaaacttcgttcaataagagaaagctccctttggctccatgcctcgtgtggtagtgacacaacctctcattactttcctgctgagtccagggctcctaaagcggtggtcgctgtgagtctgaaggtgaagttctgccctcagagtgtgcctttcccagttactccactagatggcctttcgctttaggtaaaaaaaagttttacaaaagtaaagttttctatgctgtttctggagtttaaaactgggtgaggacagagaaaagaaattgttgttctctatctcctctccttggagcagttcccagaaaaatctgatgaagagcagagagagagtggtacattgcagcacacaagaagagagccaatgtcccgtcagtagctccaaaaatgacacagaaactgcagtggttggggagcaaccccacggcaaacagatgtgggtttcctatgaaaagccagccatgctccatgtcagtgtttctttaaagttatgatgatgcacacaggtataggaagagaacagatgttctggacaggggtcaacgttcaatccgcacgtctgcttctagtaagtctttgtagcccatacacaagaccagggctttcccaaatgtgtgctgaagcccagccttggaaaccaagctcacatcttacagaggggttctatggattctcaaacgggagaaaaagaaatgatcatacaaaaacactccctaacagttgctcttggttcagttttccaagtcattggaaataaagcttggatccttggattaatgcatatgaaagggaaagaaaaaaggaaggaagggagggaggaagcaaggaaggcaagcagagagtgagggagacagaaggaaagggaagaataaggaaggaacacaggagggagaaaggaaaaggtaaaattgggaaactgaattataatttgtgctgagccaactgcttaaggttggatccatgtcttattagttccctgttctctctcatgcttttatgaggatgtgctgggtgccactcacaccaggccctgtgctggagaacatgacagacatgattcttgccccaaggaattaagtctaccagagggaaacaggtcatggcttaaattactatacaattacagttgtgataggcattatgaagggagataacagggttttataaaaacatgtaatgggatcataagtcagtgtgcagcatcaggaatcagggtccgcttctccaatgaagcagcatttagagcaggacctgaaggatgagtagacacatcaggtgtgcagggaaggatggggtaggagaatgggacactacagcggaccgatgacacagaagtacctgcagaagaacagagcctggtgcctttgaggaacagcgtgagggccacgcatggcaggagagaactggccagggagagactgccaccacttggcatggcgagaaggcatgagttttctgtgggtcaagtggacatccatgacgtaggtaagcttgggttagcttgccagggctcacctaaaatgctgtgtgctcagtcatgtctccagcagtgaggatgtgggaaatacccctgcataaaactcacatacaccccaggggaaagccaggcttgcatgtctgcccctgaagaggagggcatcagggaaacctggtgctactcaagggagcaggggtggctaagaaggaggtgccaacagtggccagtaaaaaaagggactctcatattttcctttcctgtctcatccaacacactggaggagctggaccctagaaagaaagggaaggcatctcctggcagcactcccaggccccagctcctttaggtgaggtggcaaagggagggcaaacagcctgccagttcccttgaggcctgtgcctcgctgctgacagggaagggaaggctctggattggacctgagattggacgtttaaattggacactttagttatccaaagtgacggggaaggtatagaatctgcctacaatggtgttgagggatccggcactgagcagagaagggagaactggcaaccagcggaggagggcagtgcctggaaaaatcccaatcatttcctatttataccgcacccagcttcttctacctttgccactgagacaatgtgtggaaatttgagtggcaggaaatcccacaccagtcagcaagcatgaacacccttgctgttgtctccatgtggggaggggtgggggaaacttatgttgggcacttaaagcaacctcattttcataaggttagcatcttgggaatgttccctttccaatcccttagacccgagtcccaactaatatatttttgcaattttctggaactgctcttaagttcaaacttgcattgagaccacagttatttttctttaaatgaaattctacacctaggaggctggggaaccaagtcaatcttcctcttctttactgcttaaatgctgcacagaggatgtaatcaattgctataaggaaaaagggaggcatctctctgcctgtttaagcagttcaaatgtattttaagcttaacatatttcctagaactagatttcaagtgaaaattaaaattctaagaactcacagacttaacatgtgcatgtgttctaaatatttactttcctttaaaaagctgcattgggccaggcatggtggctcacacctgtaatccccatattttgggaggctgagtcaggaggatcacttgagctccaagaccagcctgagcaacacagcgagaccccatgtctaaaaaaaaaatcagggtgtggtggtataggcttgtagtctcagccacttgtgaggctgaggcaggagggtcacttgagcccaggaggtcaaggcagtagtgagccaggtttgcactactgcactccagcctgggagagcaagaacttgtctcaaaaaaaaaaaaaaaaaagaaaatacattgtacattgccctctgcagtgagtgttcatctgagggcctatatcacagtaggcagagcactggagggcaatggaggaagcattccagacaatttctgatgagttgtgtacctttggacagaccaattcacctatttggcccttacttttctcatctgtaaaattagagtaatgaattagatcaggtgttggcaaacattttctgtaaaagctagatagtaaatattttaggctttacagggctgtaagcagccacagacaacatttaaatgaatgggttatctgttcatttatgaatgtggaaaactttcacgtgtcacaaaatattctttgacttttttttcaacttttaaaaagtctaaaaaccattcttagctcataggctgcacagaaacaagcagctggatttggcctatgggccattgactgctaatccccaaagtggatgagctctgtttccttctcgtactaacatctgacaggtgagccctcaagcctgagaaagcaaaattagaaggaggtacgttctagtgccagagaaaagaaaaggcagtaggaaggactgaaaatcaggatcctgcgctataaaaggtaccccaacgaagggagggccatacattaggccaaacttcactgtttgtatcatattcctaggactaagaaaaaaaaacacattctttttctcaccaaaatccaaggtagataagaaaagtgataggcaatgaattcttaacattcgatggacgaattgaccccatatgaagctggcctgaaattcaatgggcacgagtttatttgtggtttcattgaaaatttgacttcccagcagtgaaaacgttaatcaaatatataaataatttaattggagggaaaataatgcatgattaaattccaaactaatccaacacatagacatgcaatttgccagaggcccgagagtcagaaagagatagatggtgtaaattacaatgtggcatgccaactctctcggcgcagccactctgaactctccctgtctgaataaacagggccaggacatcaggaccaggaaatttccccagaaaagccaagtcccgacactgagcttcccgatgggtccatgtcttcagttttccaattggggctccaagcattagccttagggaactggtgactgaggaagtgaacacctcatgagcccatagcaaaccaatgaaatgatgtttttttaactgtcatcgaatgggagcaaaatgagccacgactcagtatttcttccactgtttcttccactcctttggggctccgggagcccatagaaaggtgggagaaatcacaagctggtttagcaatcaaggaggcagaaggtgcttctttcttttaacggagtttctttgggaagccgagccctggatgtccaccaaggaggcttggagagctacaggaagaaatgggaaagtgaagcttttctttcactagcagcaaaatagatgccacaatggactttactgagctaatcagggtcctttcttctcactttgttatttcactattagctcagagcaggcagttttcccttggtctgttcctaaccctccagatgaaaggacacatgcagtccatggctcgcagctctccaaataaagccgccgttcacgcagctcatgaggctgggaagtacacttctgctttccttcagtctcctctccaccaattcccactcagaaacacagttctctggatcgataagtgtcctcccttctaagtgacttcttcagaatgctaccacaaggctcaaatgtgtgtgtgcaagatctgcacatccccattcaaaccctgcccgagggaatcactaatccatagatacacacctggctgcctcaaaagtctgtccactctttacatcagccagtttcttaacatcaagaaggtgaattccactgttgtaataaaaatattacctttaagcattgctaaaaacagtggaggggggaaacgcgaagcttcaggctcaaccctcaccagtttccagacagctcccctgcgcatgtacttttcacgccagtctttctgtcagtatctaatgtttctcaaatcccacagaactgctttatcaatttaaaagatttctacaaggtacgacgccaagttcatcacaacacaagctacatgtaaaagcaaaatatatgttcatagttttcaaatacatatgatctctctcacatacacacaaacacccatgtgcacacacaggtggtgttatggccttcatagaaaatagaataagggcttagaaagcagtgtgttccatatataaacatctaagaaaatggaacagcctttctggctggtagttcactgggttcactggtgagtcactggtggaaggctgagcacacttgctccacccccagttgtatttccaattcatgcctttgctacatttctctctcttgaaccattaagatgccaccatttgttgcggtgattatatttttaaaaggcagaaaataaaactgaaacattctcttctcagaatgtcaaactggaaatgtttgatagtttcaaaatctttttatgttagtctaccaggtgagctcataaatgcagcttgagttaattaatacactgaacaggattcgataatttgaaacttctgtgggatttgctggggaaagatattaagaaagtcttctactttgacataagatgggatataaagaagtaaactatttcaagtaagctcaattttcagtgtttcttgactttatgttataagcctattactctttaggtagtattactctttaggtagtagtccagaaatatttctgaaaagaaaaaaatgggaaaataatttagaatctattaaaatttaatttatattaaaactgatttgcaagaaagactgaaatgttttgcctaaaaaaacactttccacaagaatccctcaaaacttcctgcctgaaataaggtctataccctccagttttgtgtattacttgataaatgcaacatttttgaaagttttacaactgtcatgatgtggattatattggggataccttgtaattggattcctaaatgcttcactaggcagacatagaaaaaaacatgaatcacagactatcaggactgaaataggccttatatatcaatgtgcactttaattttagataaataaaataatttaaattgttttggtggcacccatcaatcttccttcctaacagattatttaaaaacctgaaacagcctctgctgtgggagggatctccctgagacttcacaaaatgcctgtttcaattcaaactggttaatataaatatcaaggcatctttcagtttctgacataactataaaattataccagaaaatacccagaggactcaagactttgggtacaaaccagcattctctttataaaaataaagcaatttcttatttctgatttgtgaatattaagaattaggacgagataaaaaaatacgcttcttggttaaaaatgaataaataaatggacttcttcctggctgttatttgaatcctgcttttaggtacaaatgtgtaacaaaattattttttcttatgtgtaagaaaggcaaagttctttaacaaggtagatgttttatctgaacaaagggctttataatgttggatctgaagaagagaaatgaactaacctaaaatatgacccccaccccaccccaccccatcacctccccagacctccccaaggaaagctggactatgcttcactgcagcagaacactatcatttcacatttaaaaacaaaagtctattaaaaggaatgaaatacgcatacacattacaacatggttgaactttgacagcatgctaaatgaaagaagccagtccaagaaaagataaatactgcatgattccatttatatgagtatccagaataggtaaatctatatattaaaaaaggtgggtgaatagagaaattggggatgacagcaaaagggtatggggtttctttgtagggtaaggaaaatgttctaaaattcatgtggtattggttgcacagctttgagaatatatcaaaacatacgaattgctgtatactttaaatggatgaattacatggtagataaattatatctcaataaagatattaccccccacccccaccccacgcctccaaagaaaaactcacaaaagtatacttggtgatgaagtctggtaccaggaaattgtgggagaataggaagaaggttgaaggaacagccaggtagaatggaatctgacttccccagagctacacctctccttcagactgactggggtagggcccgacaagtgtttttccatggaagcacaagactgcatcttaatcacaacttctgctacaacatacacagacacagacacagacacacacacacacacacacacacacacacacacacagatgggttgagtcaaagtggaacctattttatttttttgagacagagtgagacagagtcttgctctgttgcccaggctggagtgcagtggtatgatctcagctcactacaacctccacctcccgagttcaagtgattcttctgcctcagcctcctgagcaactgggactacaggcatgcgccaccactcccagctaatttttgtatttttagtagagacggggtttcactgtattggccaggctggtcttgagctcctgacctcatgatccacctgcctcggcctcccaaagtactgggattacaggcgtgagccactgcgcccggctgtggaacatatttttatgatacagtattttccagtgggtttcttactggcctcagttaataacctgggaacctcacataaatgacgacttctctgtattcctctgtcctcatcgtccaagttgtagagatgagtggaaagatggagaaacctgaactttgtgcagagttgttaacagaacaaagccaaaaaacatcatacgctaacatcagttcaagtatgcaaaatagtgcatgatttgaaaaagcagatagtttctaatccatgatatattctaaaatttactaaagatgcttgaaaaattgacgcactgttaattcagaatctctatcttttcagttttgctgttaccttggattatataataactaggtataaatgtaaaatttgtgacataatttatctagctgaccctccaccctaccctaaggaatgcacatgtcgcaggctcaaactcatataaatagaatcacagtagtgacttaatattaacgtgacctaaaaactgaaggaaatgtgagtttttgagaagagtttctaagaagtaaatattcataatattggttgatgttatttatattatttaggtcaaaaggaaacatcctcattcttcaaagtgccttaagggccctgctatggtctgaatgtgtcacccctgaaatccatatgttgaaacttaatcaccagtgtgggtgtattaagagatggggccttggccaggcacggtggctcacgcctgtaatcctagcactttaggaggccaaggcgggtggatcacctgaggtcaggagtttgagaccagcctggccaacgtggtgaaaccctgtctctactaaaaatgcaaaaaattagctggacattgtagcaggtgcctgtaatcccagctactcgggaggctgaggcaggagaatcacttgaacccaggaggaggaggttgcagtgagccaagatcactccattgcactccagcctgggcaataagaatgaaactccatctcaaaaaaaaaaagggggggggggtggggccttaaggaggtgattaagagggcagagccctcatgaaagggattagtgaccttataaagggactggagggagccctctccctttctgtgtgaggacacagccagaggctccagctataaggcatagaatgagccctcaccagacactgaatcttctgacgtcttgaccttagacttcccagcttccagaacagtgagaaatcaacttctcttatttataaattacccagtgttaagatattttgttatcgcaacagaaacaggctaagacaggcccctaattccttctagaaactataaaagtgctccttctcttaaaattttgttttctgagttctaagttattttactaaaacgaaaatgtaactgttgtctcttaagaggcttctcttaccatccagtaagttgccttttgttaaagagcttctcagagtttctttcctggagtggcctgtatttaagtcctattgtgattttacatggagaagtaaagtgacgtgtgtaaactattctaagactctgtgcacatcgtttctacaagttactgagcagatttaattttataccatatccttttaaatatcgactttgtttcagccaaatgacaacaaaaccagtaaactcttcttaagcaaattgattaggggcttaattaccaaaaagaaagatatagagttaagcaagtaaggattcagtagtatctattctagagatacttttaaaaaagactattaaacacagataggcaaaattattttaactgtgtagtcatggaacgaaattatttggaaaaccattctccaaagaggcaccttctatttcatctctgtaatgaacaaatccagcaaacatggtaagagccaaggtttctgatttgagctctagccccaaaggaggtgcagttaaatcccaatttcctgttccacaactggctcctagatgaggaaaatagaaaggccagaggagctaagaaagtggctataaatgcaacctctccgaaggatcaaatgaatttgtcactcttatgcacgatcattcctacaagtccagcatacggagaaagcattaccatccattgcaattgcatttatatccaagttaaggatttcagaagccagattgtatcccagaacattaaaattccctcacctatgggcttggttttctgccagattcagaaaagagagttaatggatagtttctctctacactaatagcaattttactattcaacctgttgtcaaaataatgcttattttgggctgggtgcagtggctcacacctgtaatcccaatactttaggaggctgaggcgggaggattgcttgagcccaggcgttcaacaccagcctgggcaacatagtaagacctcatttctaacaaaaaataaaaataaaaattagcacacgcctgtagtcccagctacctgagaggctgtagtgagctgagattgcaccactgcacgccagcctgggtgacagagcaagactctgtctccaaaaaaaaaaaaaaaaaaaaaggaaacataatgcttattttcctattaaaactttgaaaggtaggacgaataggtataataatatttataatagtacatttgcacttttaactgtagggtgattaatgcttgcttacacacacacacacacacacacacacacaatgactatccctaagaagaacagagaagatttaatttttagtctccttgattacaaaggtaggcacaaagttttcctgttggaaaatcaagctactaggagcaccagtatctagaagtacacagaacattagcctttatttcctaatttttatgatttcagcaatccacatgaagcctaagcatataggtattactagtaaaggatctgaacatgcagtgtgattccaagaaaattcaaaagttaagaataaaataaaaaacgtaaatgaaaaacgagatccaatttgaatgggtggtctctgtcttcaatgccctacgaaagcaaccatactccctccacatcactgaagtctgattctgaacattagaacaatcagctcttgaactggccttcaagtttagaaattctgatataattttgatcactaaaatataggttaaaataatcatagttacaataaaatgtatttgaatttcaagtagatttggagagagtatttttaatattgggagaaaagttgacaattcgttttaatgaaatcttttgaagatgggaggtagagaagtgtttttggtaccagccacagtccaaactacatccacggtcatggctctccctgaaggcctactgctcgtcacattgctaagggagggtcttacacggtaagtgctgggagaactttccattggcaattaaaaatagattaaggcaagtgtgtgtgtgtgtgtgtgtgtgtgtgtgtgtgtgtagagatggatggtgattgctgatcacagaagcacaggcacgtctcaagaactactggaagaaaggaaggaggcaggcaagtaggcaaaattatccctttggaaatctgcccacagtccctgctgagctgacgcattcattcactattcactcaaagcttatttatgatatgacagttactgtgctcaacactgaaaaggcaagacagaataagacatgtccattggatcttatccaaggttggctgcgggaatgcagaaacgaatactgtctaaaaattagccttcaatgcacggacacatttgcttggcaattaaaagtaagctactcagaagaatgcatgattcttttgcttcactcatgctccccacatcatagaaaactagcaggcccattgcccagggcttttccaggtttgtcctaccaaaccaaggtggaaagcaagcccctccgcttcggcatgcttttcaacctgtagaagtatcaactctatcatttttcaatcaacttttattcacaagccaccctggtgtgcagtaccctcctaaacatcttgaccccctattaacagtacatctaagtatataaaagcaaaatctccatacacgcaatatgagtatccactacatgttctatacctagattgtaattttctttagcttattagtagaaggcatagagtttagagaaagagcataagcccagacagtaggctatagggattcattcatttgtgtgccatgggcaaaacatatatgagacataggcattgtgcctgagtctaaataaggtgaatgggaaacaatgggataggcactaataaaatagtgaagaagggaaggtttcataaacagggtaactgagctgaattcagaaggaagaaagggaggctgacacaggaaaaagtgaattgaggaagaagggaagagagatacagaggcccagtgttaagaaaaacacaatgtgttggaaaatggtgccaagtataggattggggaatgtgtgtgcgtgtctgtgcatatgtgtgtgtatgcatgtgtatgtgtgcacatgctggtgagtggctgtaggatgagtgctgcagaggcagcctggggaaaaattataaggggagttgagtgccctaaggcaaccagatcccaggcaaccaagagcaggttttaagcagggcaatgatcagatttgttcttataaaaggtaactctggcagcatcatagaggcactaagcaaagactgggcaatgaatccatctaggagttgctataatcatccaagaaagctgtgaccttgaactacagcagtagccaggaggatgaatagtaaggggctagatgtgaaagacattatggaataatttgtgggtgatgaattagagagaggagtaacaggtgataccgaagtctccagcttgaaagatctgagacaataacagtattggagggccaggagatttggtgacgattacccttctgtgtggaacatatcatagtggagatgcctccaggacatctctggtagagagatcccacagagaagacaatcctggacataaagatttgagaatctaagaaagactgcagctgatgcaggaatgtgggccccttccctaccccatgttatctttggtaaactaaaaaacacctacacagtattttaaagatttcacaaagcccaatttgaaaacccctgaccaatggagactgtacagaggatgaaaaaggaagaaattgaaaacaatgacgagaccggtattttaagagatagggaaacaaaaaaagaaagtaaaggagagaacaaaggacacagtaaatggcaggggacagagcatgtcatcatgtggggtgtctttggaggaccccaaaagaagcgattaaggcaaggaagtattaagttctttgccagtggtagcttgccagccccagtaagtttggggggatcagacaggaaagacagaaaatgtctagcaatatgttggagtgtgggcttaagcaggaaaactggttcatttgaaattactgtgctggaaggggctaaggagttgcaaatagaaatcaatatagcactcgagttttaagcagtttgttgttttgaaccttttgtttctcccatgctgcctgcaaaattcagttctgtgcaacagccttttatcaaggaggcctgctggaaaagtgagactgtgacctcatcccagaatacagatgagtggtcaccagaagtcagctggatgtgtgacaaagtgtccggcaagaaaaaaggtggagtgagaggaaacccgaggaccacactgacctggaggcacacctgaccacccctgaaacaagggagacagagcagagccagggttttagaggaaaatgccctccagaggctggcaacatagagatccacagctggagacgtgtggtcacgtctaggatggggtcactgagcgaggataacttgacctctggcagtccttcttcaaatgccacctccttacagagactcatcgccccgctcgatcctggtcctgatgaccccacttactgtccaacctccccatccttgaactctccaagccctaccctgctgctctcccttttttcccgtggcccttatcacttccaacacactataatttactgactgacattgtttaatatttattgtctgctccgcccaccagaatgtgaattccacacagccagggatttttatcagttttgttcaatgatatgttccaagtgcctggaacaatgcccagcctatagtaggaactcagtaaatacttgctggaggaatgtgttattagaaatgtgttattgaaaacaacaagctttggagccaatgtggtcccaggcctcaatatactcccaaccggctgcctgccttagatttgtgctttgagaatcagaagccacaggaaacggaagcaatttcctgtgattgctctattccccacaatctgataaacctcagcatcacagatgcctgtagggtccaccaaggagggcctcctttcagactataattttagactggggttctgagttagtcatgacataattcagagttatcttagttggctcctatttgttataaatgaaaagaattttaaaatttatttttgcccaccatgacaatgttgacataactgtggggtaagggttctggcatttaaatggtaaccctaactttcaatgttatgtcccactggctgtagaaaaaaataatctgatgctttatcgtaggtttctcttgaaataattcattaaagcatcagatgaaggaggaaaaacaaagaccaagttatccttgacaagattaagctgcactctatctcactggaatttgggcccctagctattgttcttgtggacagtttgcacagagatttcttcccaatgcaatgctgtcaacgaatagaaaactaaagggcatatttcctccttaatctgcttgtggaaatctcattcacggaatagaaatcttgccccctatcatgactaacatgtttgaagagtcaaaaaagggaagtaaggttggtcctacagaattttcattggagcaataaagaaggcactttacctagaaacacaggtttaaacttggcaatttaaaataaataaataagggtgtgtgtgtgtgcaaaattctgtggtccttccaaaggggaactgggaagaaagcctgccttgtgctaagcaccattcttcacatggtgaaatcactcctgggggagggtgacttttcttgaatttgagccatttctgcaattttgttttcttgctttgtcttttacctccccaccaaagtaagaatttcattcctcaagaagtgctaatttattcctcaaaatatgtttttaatttggtacttttattccataaaacttatttttataagcagattttcttgggagtatttggccggtgtatattgcataatcattcaagtctttaaaatctttcatttgacacttcaggcacatgcctgtgacatatacgtggctttcataatgatctccacattgcatgtgaacagaatattaatttagtgtggttataccagagcaactggttaaaagtttatgaatttcagcactctctggggaataaataatgaatgcgcttgcaaaataaaccagactgaaactaactgaaactcaatgttcggccaaattttgccacctggatttttaaagtaaaagtgtcctgttagttattttatctaaagtacatgcaaaatgatgtctgtatatttcatttgtcaggtaacacaactgcagtacaagtatcaggagcatagtttgtttagcaaaaagtcaagatgtgtcccctggtcccaggctataggtattaaggtccttgccacccatgatggatgtgaatccatccgtcatagatgtgggaacatggctgcttgcgttatgctccttcctggtttatcttctctcatctgtttgcaggaacctggtgtgtaggctgcacacactgggctttggctcatgccaactcttctgcctggcctgcttgtccgatgtctttctacttggctgcctcctcctcacacctcatctcccacaggagggttttcctgatgttcagaggggttcagaagcttacctaatagtgcaccatgagtttgtggcatagataagaacaaaattcagggctaaactttctacccactatgtagatgtagctgaggaaaaaagtggcaatttcaaggtctaaaagtttgctcatttgtgagagagtcaaaggcctcgacagaagagaacatttcccaaatgccttttaattaaatgctacagaaaatgcacagaagagaaggggtgctgtgtacccattaaaataaatgagatgaagaaaagaaagaagaaaggcaagaagggagggagggagaaaaccgaaagcatccatgcagacatgcagacacaaacacacacagtgtactcctgatactctgactatacttgatacatattccaagatcctagactctggggcactgtcaaaaccagtaaccaacattacaagggttaaattagttatccttggttggcaatgggtctgacctctgctaactggtggtctggaaggagataccaaatctaagtgaaagtccccttcagtgtaaatggtaaatttgctctgttttgatcccagggcctgtggttcaactctcaggagggatgtgttaacacttcatacagtggatggagagaaaactgctgtttttagaaaatttatttttggtggctaaatgcctttaaactgtatgttcatacatttgtataaactataattccctctttattttggtcttgatccattcttattaaaatgaactggctaattttcctaaattattgtaccattaaaaattatttgttggaacaattattttttttttcctcgagtccacattagagaaaaggcctctctcagagccacggccaatccactttcccagtggtcttcactgagcatcagcagttcaaacatacccaacctgtacctttcaaatgctcaacacagagaattccccaagggttagtcaaccgctggctcatatacaaagaaaatactgtattttgctctgaagagctttctgaatcaatttaaacacagtgagacagacacaatatcccagagagaggaaaacctaccttattacattcctgacccaagagaaaggatttgcccttaggacataaaaggaatctgagggggtatggggaaagaattatctaatcctaaacgtaaaaacagttcataatgcagcatgacaatgcttttaatcgctgacataattgtaatatgtatatataatatgatacaaggaaggtaaatgcagcttgcttttcagccttaaaggctctcttcaatattctacttaaggtcttctggattttatgcatgcttgggggaattttcagggggaggtaacgtgatattataaggattctttctcagtaagatcacatcttgttctgatttgatttgatgcatctgtatgtggcaagtgtggtaaagtgaaactaagctctgtgaatgcagtgttttacaattcctccttgatttcctgtgcaagcccatgtggccataaaacaatgggcagaagaattgggatttttatttcttcatatgggaaagctgctgggagagacactcccgtaatctcagctgtgagtggtgtgggcgttcactgttttcctttcagggctatataaaatatattttttaatgggagttgagtttttcccccagatgtttccatacatgatataatgtaagcctatggtaccatctcccaggaaggaaaggcatccctgagtgattggttggaaggctgataaagaaacctgacattttgagaagtccagcttttttttttcttctttaacattatttatggaaagaattttacaacacccttaaaagtcactatgtggtggctggactttaccaactttgcaggctgacatttttacactaggcatggctgggacctaggagttttgcagtgttcacattttactaaagtgaacgctactgacaattctggcagatgccaatgatcattccagaatactgagtatcagatccactattgctctttgcggtcatatgattagatgagcaaaagaaaaaagtgtccaagtaatagaaatttaaaaataaagagagaaagagctggtgttctggctggacgttgtgtgtgtcctaattctcctgaacatcaaaatccctcaaatgataccttctgctttgctttctagctgggtttattttgcgtgagcatggctttgaccccttctggactgcttcctgagtagaggaactgtatcacattcatcctggtaccccacaggccttcaccctgacttccacacgcaggtgctcaggaactggtgcttggtgcaacataaatatataacttgaaccaataatctgtttcctcatatttcattgtagctgcagttaagccgttcaccaatccagatgcactgaaaagattttctcaatttagctctaatattgatgttttcttgctctacgtcagaggagggaagcttctgctctagggcagaagacatctcctatatgccggctgcacacttaaaattttttaatttaaattttaatttattttttgcaaagggcaagaattaggaattctttttggttcacatgttgtcattaagctggctccaccaggtcattctaaggtaatgcttggaaagaggcggtaaaggatggaaatggtcactagggacttagaggagccaggggctgacttcatttattttacaagtaaactgagatggctgaagtaatcaatatatggcacctcttctaaggtattcacaccacaggctcaaattccaagcatgtgacagagaacactgtattttctttatacatattaaaaaaatagctcttttactgcttcttatctgaagtgtccagaaagcctgtaaaaaccattcaaaagaagcccaaaatatgctgcaaacagctgcttcccaccatggcaggacacgggatatgtcaaacaaattgctaattatgcattcattaatgggacctattccatggccctcacttatataatttttcccttcttaaatgcctcaaaaataaatttcacctctaacttttaacacctctcatcagactatgaagtacaaaatccattactcctagtaagaaagtaaaataataaattagaacatttcaatagagtgcttgattttattggcagagactctgaatggtgttaacattggctcagtacaaattacactccacagccaacttaatgcacaagctatggatattttcacctctacattactcaccaaattattcgtcaactttggacatcaacaatcaaagcacttttttgtgttatgcaaatctatgatgtaaatataaactaacacctgcaattattttgcatctttctcttctgctaaaaatattagttttcaccccaacctacttcaatgtcctatttaatcttctgtgttttcccccacacagcctttcaccctctatggagtgtgatgggcacgtgcactgagattttgttcaaatgtgtccagggttttccacatttggtatcaagtgacttgagaagttggaagtttgcttagtatgaaaaatggattattcagatgaatggagtttcctgttgaagagagggtagcatatcattttccacaggacattacgccatgataggaagttatcatcaataaatgctggaccttagatggcaaaaactactaagaaaaaaaatgagaccatctggattaacatgggggaaaaatgaaagtgacctaggacacctgccttcatcactgtatgcacaacagcagcactgaaaactcaccccacagactgctgcaccctcacagagcagcgtagtcttgacttatgcaatgtggcctttggacacatcttctgaatcagaactcaatactgtccacaaagacagaaaaaggttctgattgatactattgcttttcattggctctgggctactggggcttcactggccacaaaattaggcaaacatcttcccataaaccacaagtacgtcaaagtcatccagggtggttattcttgccctcatccactcctcttttacacctttcagacaccacatctccaacgccctgcatcaggggccctgaagctctctgtggtgaaggaccattctggcctctctcatctgtcgccgatggatatgtggtcctgctacacatgactagaacaagtgggggccactccttggcgaccttgaatttgataacatccaaatgagtctatcctctgtttggtgaaaagaacctttaaatcccacactttttggcaatgtcaaaatgccatcaaagtttctaaatgcatactatccattctctgcccatgaagcacattttgagccccaaggctctacagaatcagaaaaaaagagagcacctgcagcagcctcatggatagggcctcagaccagcaggggaactgaaagccacacatccagagacccacactatgacatgctgtactaactagagaagaaccagtggcaatgtcttacccagacagggagagggaacatcccaccttcgtcctgcagggctgaatgcccgtcaatcacagaactggttcaggctgagccaagcacgctcatctgttgaccgtattacacacaggaagcacggcgggaactttctatcttagaaggggatggagaaagaaaatgtatactgtgtttgcttatgtatctacaaaggaattccagaaatatgcagaaattaagggtagttgatttgtagagtagagtgagaattaggcagatccaggacaaaagaaagaggaagatttttcaatataaactttacgacttgctggttttttaagtacatgaatgcattctaattcaaagctctagaaacaatgtaaaataaatcagaaaaagcaaacaaatttttaacaacctaaaaatgtttgcgagttgagataggaaatgttccaatatggaatgggattatttttgtacaccttgcacacaggccaaaagcccccacagtcataggaggtccacgaacattcttttcttgctgaggacaagggggaggaccactaaagactcggtaaaagcaagcttgtaaacaaagaattgaaaaacaatcagaaaaaaattagaaatgtctgctttctgtccccaaataaaaaaagcaatgatgcctataaaaaaagaaagcattcaagtggagaagcatgtggctagaaggctgagggggataggaagcagtctaaacatacaacagcaggacaaaacccacagtggaggcagcaaggagctgattgaagaccaaggaaaccaaatcagatcaactcatggacccacacatgtcctgagagaagaaagtggaataaaggaaactgagataaattaagtcacaacagaattaaacattcttggaataaaccagacctgaacttcacgtataagacctaggtatatttggcaccattaaaacattttaagaaaaaaaaaggaggagggccgggagcggtggctcatgcctgtaatcccagcactttgggaggccaaggtgggtgaatcatgaggtcaggagtttgagaccagcctggctaacatggtgaaaccctgtctctactaaaaatacaaaaattagctgggcgtggtggtgagcgtctgtaatcccagctacgcaggaggctgaggcaggagaatcatttgactgtgggaggtgaaggttgcagtgagccgagatcacactccagcctgggcgacagtgtgagactatgtctcaaaaaaaaaaaaaaaaaagttaaaaaaaaaaaggggaaacaaacacagaagtatcctcccaaagaggaaagcacaagttaacataattttgccatatactaatcaggaataggattctatgatcaatggtgttaggaggccaacctgaccatattctcctcttgaagagctgcaagacatagtggcataagaaaggcttggataagtctcacagccaggtatggttaactctatttatcctagctttcattttcacctgatacttgtcgacatcctgcagaactagtgtgctgcaatccattttagaaaatattattaataaatgcatataagagaaaataaaattttctctgccaaattcttgaattgttactaaggaacaaagggatggcaacaaaaatatttcaggaaagaagaagccattgcatgagggaacccagcgttgaagtcaactaacacacagggcaaaatatgaaacaaagttgaagactgttataaaaataaacatataaaataataagcaagggggacaataatggaataattaatcattttacaataataactgagtctactgcattaattgataaaagcagaaagaaaagaaaagacagaaggtaaaaaaatttttaaattataaattgtcttgcaaaatcatgtatgtgtgtttggggggcaaggagtgatatttatttttccacaattagaaatcatgcatttaattatgtgttcattaaatgtataagcaaaaacactatttttaaaacactgtgtttacttccaaattgaccatggtaaaaataaggaaaacatggcaagacacacacacacacacacacacgcacacacacacacgtgtgcaaataaagggaagaattgagagggcacacaaaaattcacattcaaaataaatgactcattgccacccactttaaggcaaagtttctcagagggtgatgaacgcagctataatgctcataagaaagtcactaaaaattatagagaattgttaaaaaataaacagatgaatatattagtgataataatcttgatattaaacaaattagacttatgacaaaaagtttaaatagcgacaacagctgtagttgttctctaacataatcattaaagaaaagcaacacttttctccaccaaataacagagcatcaaaacataaagtaaaacctgttaaaataggaggaatatggctagaaccataatcacctgagatttaatataccagtaccaatttataataaaatacgtagacaaagaaacaagtagagacaaaatgaatttgaacatcattaggaatcctgaaagaacagacacataacaatcagtattgcctgagaatctattttcacttgaccacagaatatcatatatatcacatcatgaaaataacctcaataaaatatttaaatctctatcgtcaagataaaattataaaattgtaccacaagctgaaacactaataagcaaaatctcatgtccaggggctataagaaatcatagcatacttattggcacagtttgtaagaagccaacttggctctcccacttactggcaatgtgacaagagacaagctgctcagactcacagtgacttgtttccatcatctggaaaatgaggctaatgataatatccacctcattaggttactgagtggattaagttagtgcatgctcttagaatagtgcctggcatgtaacacgtggtgacaaaccaagcactagttgcctaatattagtttcagagcctgtattgttacaggaatgcaagcaccatgaggacaggcatctttgactgtttcattcactgatgtatctccagaatccagaacagtgtctgactgatagcagtagatccaaaaacatttgttgagcaataaggaattaatgactgaataaatcacacaaatataattacagactattttgaaatatcaaaagaaagaagacagtcaaaattcatggaagtcaaaggtaaattaaagtgaatgttataatctcgaagtgcatgtattatttaaaaagaaagaaagaaatgaaagcagcatttcacactagaaattatggagggaaaagcaaaactcagcccaagaaaatgatgctagagaaaaatatttcctaaaagacacaattaaaatttaacatagcagcataaataactaatttcagaaactcattcctggaaaaaaaatgaaacaaataaaaaagaaaccactgataataactaaacaaatgagtgaaagtacaaatgacagagaaataaaataatgaaggtgatttaataaagtgtacagcaggcatttagtttaaataaccacagtttgataatattaaagttgaaaatctcatcaaaacccgagattcttctggagaaaatagaaataactcattcattcaaatatgacccaagtcataaaaagaaattttaaaaatcattattaaaggattttattctcaaaaggctgtagatccaaacagctttaccagaatgttatttcagaaattccaggagcaaattattatgctacgtaaggcactcaagagacggaaatgatagatatgacgtagaatatatatttttgtacatctagccatgtctctggtatcaaagcagcacaaaaaatgaaacaaagatataaatctcagtcataacaatgtgaaacttataaataaacaggaaacctgtatctagcaacatatcaaaagagtaactcacctggcacactcaagggatgcaaagatgatttaagacatagaaatatatcataccacacagtaatctctatgtggcaaacagtcagtaaagtaactacaatcacttgagataaaagtcttagaaaatttaggaggagaaagaagggcacttcattcacatgcccaaacattatctatgttaactgaacagtaaagagaataataaaggttgaaccccaaaggcattattccctttaataccagatacaaaactggtgttatacaaccaacacaattatctaacacaatgccaagaaatctatccaatgcaatgagacataaatgaaatatgtatctgatattttagataaatatgtatctgatatttaacaagataaaattattcttacttacagatcacaggagtgtattattagaaaacccaagacataaaatacagaggcatgaggaaatatcaagagtattcaataagttgattgcacataaaataaaaagaaacaaaaacccagtatacctttgctattaaaagcaatgaccaggaaaggaaaaatgcatacagaaaaaaacttcctacctaggaataggccagaaatgaaatatgaggtaaatcaaggtagaaagctcagaaaatgaaaaaaatatatactccattattatctggggaaactgaatttaaaggaaaattatttaaaatagagacagggtctcactatgttgccaggctggtcttgaagtcctgggctcaagcgatgcacccacctgggtctcccaaagtgttgggattccaggcataaaccaccgtgctgggccaggaaactggattttagagaatgatattcttttcaattcaaggctttagtaacattccaggcaaaatccgaatggtatattcttttaaatttagttcaaatcattctaaaattcatctgtttaactcagttatttggttttaaaaattatatctgaaaggaacaatccaaattaggaacaaagaattttacacaaagaggtttattatttctgatggcaaaaagagtggtgagaaaaaccgtaaattacacacaacgattcagtgatgatggcacatacatatgatgaaagcaagacacaaaatagaaactcacagaaccaacacatgaagtacagactcaatttttagaaatacatgaagacaaaaatattttaaaatattaatattttaataaaagttgcctctggttttaactgcttttgaaggaattatggatttgggctttaaaaaaatagttatctgaaccttaccgtttccctgttgctttagtaagcctcattatgttccccttattgaatgctttggtgagcgtggtctctttaagggctctctaccgtatgtgactataatgtttgccatattttagaacgtcaaaatttaagaacggatggatggatagatggatggatgtggtgcaaagtgcttaactgctaaaaaacattttttatcctgaattcacatacacacacacacacacacacacacacacacacacacacagattcagagtcatgtctggatggacctcctctaaattttggggtccattgagtgaacacggtgctgccttttgtacccttggcagggagcagctgatacctgcctccctagaatacagcccaggtgctcgcctccccaggtctcctgtccactgttcagacaccgacccattgggctctgctgcagcattaaccactgcccgacgtgggaagggagggaagcgtatgaagacaaaggatattattttactatctctctaacttcctgttcaatttctctttccttgttttgttcctctcgagttctaaagaccaaagacagggttccccttggagtcctctggaggacactagttagtgagaggagttgaggaaggggagagggatgaggctgttttcagggcgtgagggatgggtatctcacattattctctagaaatagtcccaagttcagcatggtctccataagcgaaatgatgttacaactcttagaaccaaccaaatgcatgtttctaccataaaggatcttgttgctttgccacttatccctaatttgaatatatcatccctcaaaagataaaataagtttagcaaatgacacagagaacaaattctaaactagaatatggatccccctgtacttaaaaaagtataagggatacccgagctcgaagggcaacattgcccagaacaaggctgtctgttgtctgccagacttcaggctccaatggggcacaggctgcctggtgcttccctcaatgcagagttagtgggggcagtggttctcagatctctgtatgcacaggaattattcctcagctctggagtgaggctcaggaacagacatctccaagagtgggaggagaagagggtgggctgggagacaactgtccctgggccaccacgtgctggcagagaactctgaggagtccaagaattctctatgaaacctgccctccctagtcacaatgcaggtgtattagacaaagtatgaaacatttcattcatttatcagcttgtgagcttggcttacagcttctaaatattgagatatacagtgtgtgaacctgcatgtgtatgaggctacagatatcctatcaggggacaggcccaaaaggctctgacaaggactacaactcctaattttgggggctagggacagtaaggtttattcccaagtcaggaatgtgctattccagggaaacatggataacttcaagtgacccagccaggtagagcccaagtttctcagggggagacatttctgacacttacaggatccctaacaggaattgccagggaggccctggtaagtgcatttcacagagcactttcttaggacttaaagaccagttcatttctatttggttctttttattcatttcttagtttctaaatttcttaatacatttcaggagttcctgacaataaaagcattaggaagtggaagtgataacagggttgggtcatttctcaggcaacagaaatgtggctgggttccacaggcagcaggtgaggctctcccaggtgtttttagctcagcctcagcttagagccaacaatctctcaaaaggaaacgttcattcttaactcgaaattcttgaaggagagaaggaaaatgaagggccagttgaccaacaccaccaaagatatcttagctccacccagaacacaggggaatagagtgaagtgaattaccaagataatgatgctaaggaggaaatttaaaaaaaaaaaaaaaaaaaggaaggaagaaaaaagaacccaacagcaagatattgctacgcaacagacagaatgagaaagagctcagccaagttaaaagttcttatgtcatctcttatgtgcttgaaataaaaacaagattgagatgcactctgctaaggactgcagtttaaaaaaagtgattttaaaaactcaatgatcacaccaagttttatatccttcaggttaagagttagggcacacatttccacagtgcaaacccaagagaaaaagaagtacttattgaggaaaaaaacgcctttcctggtattctcaaagtacttgattatttacctctcaataagctcggcactaatgtttttatctcaaaggatctcagaataaaatgtatgtgatacaaaagcactcacagcacaagactaatttctaaagaaaattatatgggaattttcatatgtaatacccatagcaggaatggttacatcaaaatgaagtgagaaaaactaaaaaaatctaagaagtttttacaatagaggtggctctggtatacaaggaaaaactgaggcctcacagtacccacattcttaccccatgtcagttacctgaggaactcagaggttcaccctttcaaacagtatgtcggcctagtttgttttactaagtagtaatatgttttataataaaaaaattaaaataaagaaggaaaagtcttgacctagatggagaggaaaaactgctggagtgttataaaactgagatgatattgttctttgttgagaacaaatgaaaatgagtccctactttaaacataggcatgtaactggcttgcaagaaacttctgcggtataaagaatttcactcaggttcgagtgggactaagtaaatctagtccagcaacccactggatgctctgtattacctctataataccccacacccatggtgtacaatttaaacaacctcacattgcagtacaggagctccctttcccctgggtaaacattttggacgggtctcagaggacaattcggttttccttataccaagcctaaatctgtctccctatggtttccatgcattggacctttgatccatacattgaggacaagctggatgcagctcccacaggacagccaaccaccaacaaatatttgaaagcagttatcatgtcccttggcactttctgcccaccttcaacttgcaaaacttctcttccttggttcttctttattttttcagagatggggtctccctatgttgcacaggttggagcatagtggctattcacaagtgctcactgcagccttgaactcctaggctcaggtaatcctccagcctcagcctcccaagtagctgggactataggcgcaaaccacaccttcttatctggttctgtcaaccactctacacgaggcaagtctggttctttctctacctgatccaatgcctatacatcagtgtatctttagaaagtggagtgccagactaaggtgctcttttccagagatactttgagtgtaattctaataacatacttctatttctatagttgagaatcacattagctaggcttggtggaaactatctttgtcttgtaatagtgaacttatagttgattaaaggtcctatgttgttatcataatttttaatctccttagagctatttcatgttttttatttttcaagatctctgaggatcctgattcagtcactaactggatataaatattcctcacaaacaactctgatgataattgcactccacaacttcatcctggaaacaggtacaccaaattgttatgcagaccagggctgggagcccagcccagcagcacgattctagaaacagctcccttgactgatgccaagccatgcccttatcatccacccaacaactacatctcctaactgctgtttaacacaaccatcttcctctgccttggccgtagtttcttattaaaggttttgctgaagtcccgtcaatcatatttactgtattttcctgaacaaccagtctaatgatattgtgaaagaaaatatcagcccggtctagtgtgacagttttcttagtgaacccagagggtatcaatgatcaccattttatcttataacaggacaacacgtttatgataataaaaatagagttttctctagaattgacttgaccctacccttggaactttctgaattcattttcttgtcccctttgaaagtacagaacgatagtcaccactttctatctcccccagcaaattgttcttttttttttttttttttttgtaattgatcaaaaatttctgatattggttcatcgtgccatttgtaaggaattgcagtcctgacgttgccactcaactggcctctgactcccttaccaatcaacgatcttactcttgtgtcagctgggcacgcatgcttccttttcctgctgtctctgttcccaatgggaagccccaggagaacgggtctcatcggcgtcatcactgtcctctcagttctcgttccaaacaaataacaaaatgaacaaatgaacattcacttggaccaacacagaagatgagcaaacgaggaagtgagctgcttgctttcactgccattcgttgattgtaaaccattcattccaagggatgtgcctccccgttcctggatcccacagcatcctctctgtggccatcaggacccacagtagccccagtggactggatatgttcaggtaagtctatgtcactagttctttcttatttccacatatttactttctttcaatcttttgtatgtatctaactttatcaaagaattccattgagatctatattcttcaaacttggtcttttctttcttagataatccatgaatgcttacagtggctttctggaatgatcctcaactgacttgcagcactttctccaaagtctcttgctattcaacaaggcccccagggaagccaggattgacactcggagctgctcctgggcacctgctcctgtgcctgcacgaggctccagaggctgccctgagagctgtttccctctggagaagcctcatctctgcctctctccatgtgaggctgcggcttaaagtgggacggtaaataacacagggctgggtaggggagtgcactgggagcttggaggttcaagttaagaagttatgcttcttctaagtgttgcttccagctttaagtttaggataatcgatagcacacctgaccacatcaatagacagatgcctcttctggatgagttcatgggtttcagcctgagtggaaatattcagttatagatgagcatgtgattttcacctgtgttttgatcaaagagtctgaagtttctgatgaagtgttatattcgctttcaatggtatctaactggccataaacatgtgggaaaatatcaaacttgaggcaacttgactgaagtggacaggggaaggggactgtctttgttggggtgaagtgtgagataataaaatgcatacatttaatagttaagaacatctaaaggccaaaccttccttatatgcaccaagcagccattaaaacaatatgatttgtgtatgaggaaactgattaatcagtagcaaaccactcactaatgagtttagtggccttcaatatgttttttagccttgctagacctccttgtagttggttaggtcatttttaagattccacaactaggagggaccacagcaataatgtccaggaaggaggacacaaaccagctactaaaagaggattatgttcattcctacagaacagaacagaacctacaccccattcctctgaatcaccatttagaaataaaatgtggtcaatctaccagtctattttatttgtctgagtccacctagcctaatgctttgactattcagtcccactttgtttaggggaaatgtggccactgtagatgtggccactgtagatgtatggagttatttgctgggtaatgcctgtgtacccacagatagcagtgtcatagagcactccacagccagactgagtccccagcccaggggagcttaggcagcactcaggcaagaaggggtggtactgagggaagcagaatgaagttaaaggtgagaccacctgaaaaaggcagagcctacagcttaaaccctgccatagctttagcagtttctgaaataaagcaaagagaatcaccatatggcccagcaatcccacttctagggatatacccaaaagaactgaaaacaggtgttcaagcatgaacttgtaaatgaatgttcatagtaacacaatagccagaaagtagaaactcaaatatccatcaacggatgcacggataaacaaagtgtggtatagccagccatccaagagaatattattcagccataaaaaagaacaaagcactgatacctgccacagcatcaatgaactttgaaaacatggtaagtgcaaaaaaggcagacatcgtacaaaaggtcacattttgtatgatttcatttataagaaatatccagaataaacaaatccatagagacagaaggcaggttggtggttttcaggggctggcggggagggggaatgggaggtaaccgcttcatgcatacagagctgccttgtggggtgatcaaaatgtcctggaagtggacagtgttggcggttacacaacactgtgactgcgctcaatgccacacagaactgcaaacttcaaaatggacaaaatggtaactgctatgtgatatgtattttactgcaacatgtttatgctagcccagtgagtacactggccagatccctggccggggccatcatctctcctctcttcctccccgacttcctgctggtcctcaccgctcgtgcctctgagcagaaaggataaacctaatgagcccaagtgtcagcgcaatataaattacggccaggggaaaaaagaaacgacttgatgcatggccgaggatctaagagaggaatgtccaccattgtttgtgattatggatcacgtcacaatctaatagccatttttatttaatcaataatttccatgctgaacagacagccctgttacagagaatcgacaagcaggtactgatagcgacaagcctcgttattaatctttcctctgccggcttatcagccaaactactgtaaaaggcaccaccaagatggattttagaatccaccttgctcctctcccccctcccttttcttcttctctctcctgtaacatttcatgtaatgcagacactacatttacttgagtaacctggggcttgtgtagcataaaaaggcagttcacgttaagcaatttcacaaatcagtaggacctagaccattgctcagggttagccattataggctaataaatcatactttctctttgagttgtcaatcgccaaaaagctttgtacaagtgctggcatctgtaattccgtaaaggcttttcatcttaaaataagatgctctggactgataacaagaataatcccctcttgatcaagaaaaaaaaaatctgcattatatcaattaaagctacagccagaagccaaatggctcagtactgagattccagtgaagtttatctctgctaaacacgaggaggaatacagtgagggctgtgtttcacttgcagcttgactgctttatcttgtggtagaaactgcaccagaggaacctgtgcaaactctccctgcccccaggaaaggccaccaggaagacctcctcttcacaaactgggctctcccgcatgtcctagagagctccttgggacaggtcacatgtgctgaagcacaagggagagcctaaagaaacaccatgtccctttaggcaggtagagcagccgagataagattgggccggttatgttagagacatggttgaccggagagagtcctgtgaatctaacagaagacagctggtgcagttttgttttcctgattagaaagacattttcattcctgccaaacagatcaggaactacatcccattcatctgaatcaccacttagaaataaaatgtggttgacctacctgtctattttatttgtctaagcccaccagacctaatgctttgaatattcattctctgtattcgtccaaaacaatcctgccctgattggaagaaaagtggccactgtagatgtatggaactatttgccaggtgatgcctgtgtgccacaggattatatattcataactagaaaataagacacaccttattttttttttttgagacagtctcactctgttgcccaggctggagtacagtggtgcaatcatagctcattgcagccacctcagcctctcaagtagctgggactacaggtgtgcctcaccatgttcggctaaattagtattattattgttattttgtagagatagggtcttgctatgttgcccaggatggtcttgaactcctaagttcaagtgattctcccaccacggcctcccaaagtgctgggattataggcatgtgccactcgcttggcctggcacatcttattttgcacaaagcaaaataatgacaaaggaaaaatgataacaatcacaataaaagctaactggctctaaaaacttgactagcactgtagtaggtatctcccataaactatcagagataattatcccaacgaccctgataatcctgttttaaagaaagatagcagaatcttagtaccctttggtaaagagcctgatgccacacaggcaagacacagaggttccatgggtaacgtctcctcccagcactcagccagcagccctgaagcttctgacttctctctggatatcatgcagaacatccacatcagctgctcaaactgtactcgtaaaacatctccaaactatcctcccaaattttaaaaaataatttcaaataacttccactgcagagtctcacttctggccctaccccagtctaaccttgccctctttaatacactgtacttgcaacttgccaggttttgcaaggctcagccccatctttctaaagctgatgctggctcaagccattcctctcatcaaaagcatttaattatccttactccacctggaataaaagtcagactcctagtctagcaatcacatctcccatgacatggtgctactcggctctttaatcttactacccactacccttctgccttccggacatactttggttctgctctaactgcattacttatcataccactcttcaaccaaaaagcataaaacaaatcatttgtaattatatttctaattcaaagagatgccaaaaacctcagtcttttattatattagctataatcatagataaaattttcccatactttctgtaccctttaacttcttcctgctgtcttctccacatagaatccccaatgcctttctgcaatggtctttctgtgtttacatccaccagtttattccataccatgctcatatccaatctccatgagatgtatctttcattccttcttctgtgccttcaccttactcattttcccactgtcctgcttgtacatcgatagtactcataacagcctgccctgtatgctccccttactcaaagggatagcccccaaccccagcaccctagatcggacatgcatgaagcgttttcttctagctgctatgcctgcaatttctgtagtggccaccaggtggtgacgatggatcaacagcagatgagtaaacaggtaagatgaacagcagcctgcataggcgagcctgtgcaactgaaatcaatggtatacttatgactatttttaaatgttcataaaagtgcacttaatctctccattcttcagttgagtgagtttattagtactacttgctatggatttttccttatgtttgaataaagcttttgagtttacaaagtacttccattataggatctcattctatcctcataaacaaaaaacaaattaaaaaacccagtgaagaacctagaatggatattattatctccactttacagatgagacacggaggatttactgcagggtgacttacttaaattcagaaacagtttctggcagatgtaggaatgaaagacagatctccaacacattatctggtgttcttcccatcccccactcactgattaatgctggttttactggtaactgggtggggtcgggtggagttggtttaagtttaaggccttggcttacacattgtctcctgaggatatcccatttacagttctcttctcttgcaacattaattgttctagaaaaaataaaaatgcctccatggtagtatttggctaatcccagagaagcctaaatatccccaaatcttaaaaaaaaagtcctcgcattagaaaactgctttctgttcccggagctctgttttatgtcaaagcaggagcctgatctccaactctgcttgctatgatctcagaagttggagtctgtgtgacttccctaggcctgaaaaaaaaaatagtgatggagtttctccaccaagaaaacgggcttggctggttatgggccttactgagaactactgtgtgcctaaccttagcaaatgtggtttttaaattaagctctgccagtttacacacgcacacacacacacccacccccccacacataggtatatttaagtagcttcttactagagacattttaatgagatcatctcttatttctaatctgaacattctaaagaacatttaaacaggagaaactttttctttaatcacaatttttttttgtttttcttacgtgtgtttttctttctccacactacgcgacaagaggaaatatttagggcagaactgggggcaatactgtctcccagggacatctgacaatgtctggaaacagttttggttgtcatgacgagggagggaatgcgcaggacagcctcccactataaagaactggcatctcatggggagaggcctgggatgctgcttaacaccctacaatgcccaggacaacccccaacgccagagaatgatctgcccttatgtgctacagtggagaaaccttggtttggtgtaaccaccgaagaaaatttccagaaggatgtcaggacacatgaacaggagagatggaatctccgcactgcagaaaagcacaaggaagaacctgcaatggaagaaatgaacccagagcgccgctccagttcttctcttgcagtgtttcatgaactgggggcctatcgacatctttctgcaattactaatttcatgctgacataccaaccccaacactgcctgaatattaacctaacccctgcttttatacgtgacatgcatggacacagcagcctctaaatatcttgacatttttctctcgtaagcagaatcactaacattttattgagtataacttttttagctaattccctcaccgttttatgtggtaaaagtcactattttccttgggagcagagcaggccgtgaacccaggtctgtctgctttgaaacacattcacactgtactgccactgggtaatgatgggaaacaaaattattccttcaaatcaggtgctaattcttctcaaatcatcatcatcaccaccatcatcatcatcatcatcatcaccaccatcatcatttcatcaggcctcaaaagtttacctgcatgatttactttgaccctaaccatattttccacctgtttcctaggagtcttttccagtattcctctgtactcctccctctctcagcccatagagtcgcaatacacaattatggcttctttatgtttcacctcttgttgttcactatgcttttatgtttccttatctcctcctcccagtcagactgtccagtctttgagggtgtaaatcatgtgtccaccacaaagctggggctgtgggtaccacatgggctgtccccagcccatgtagcacctgccagggctctgcacatctcatcaagagctgttgagcaaatggctgatccactaatgttggcttgtacttttcctaataaacaggagaatacattatgccagcaacatctgctataggcaagcatattcaaatgaggtatgcagcccagcccaaagtgaccaccattcccacttgtctggagtggatccatacagaatattccagggcactaactattggcagaatctagaatctcacctaaagtatcattgagaaccagctaaaaagctttcaataggaaaatgttccccagatgtcagaaacagttactcggaggaagattttgatgaaatatttcagggagtatacaacggatgaatgaattaagaaagtaactaatacatggccgcctcttaaactccacctgggggcagtcacccataactgttcacagccccccgccactcccagcccaccccaaactccctcccaggctgaaaggggagggggactctgcacagtactcctggtggctgccagccagctagctcgcacttgagggagaatctgtttaccatccctgtcctaaggactatccaattcaaactttttgctttctttgactgaaaccaaggttgaacgaggcaaggccaggtcttattcagcagacacacaatgcggaagaaaaaggaagtctcttggcttcagtctagcgtacatcccagtttagcaacaattaatataaaataagccacagaaaccgacagtgccaccgcattctcctcccccactcaacccagcgaaacacacacataaaacaatgagagactgagtgacctcttcgagaccctctgtctgtttctcattagacctactgcatgtgatctgtgcttggccttggacgttggggacagcgtttattttcatggctgtttcacagtatgataagtgagaaaataacgttctaaggggtcaaatggttctaaggaggtcatcccaagagtcagggcagagatggggctgccactcagaatcctagctgggcctggggggctctggccggtggaccacacagccctcacacaccctcgcaatcaatctgatctcctgagtgtctctttatgggaacaatttctgcaggtgcaatttagtcagcaactttaaagagaacgtgacccttaaggcaaaattgtcaaaagatggctttgaagtttgtagttcttagtctatattttatatgccgtgtttccaaataattagagtaaccgaattaactagcaactccatgtagggaaaataagatcaaaatctccactcatttgttttatgttttatgtgcacacaaaactaatttctgcctcatatctgagacccctatcgcatcttaaactcaattttctcttaggtaaggatagacaatgcaactttagcaaagggatcgaaattatatgggaaacatttaaaatgcaaatttaggatcacggtattaatgtgaaaagaatgtcttcacatcctaactcttccttgcgtttctacagacacatcaattcttcacaaattagatgtgttttctttatatctaaatctctatattaaaaagaaagcccctcattttcatgctgctgatgtatagaatttgtttccaaatggcagcaaaggtgattatgactgtgttcttctgataaaggaaacttcagcatgcttttagagatcaaaattcgcagcatatgaaagcattttaaaatccaagtaggtggttaatcactctacaaaaagatgaatttttgacacaatgcttcacggagacaaatggaggattacagagacttgaacgccacccagttgaagctgggtgctaacagaaatacatctcactttctctgcggttctgccccacaggtagaagacaacatcccccagtgcgattgccaagggccctgcagggttatgctgctggggattgggctggggaataaaacttttaaaatcatttgactttttaaagacccttggggataatattacatgtgttatttcttacacagaaatacggggttggattgttgaaattgagggtgaagagttgcagagttacagcaaacaggtggacatgaagtatggtgatgatactattattctttcgatctcagcactgatgttttcaagcataaccagccactcagcagtaatgactccacactgagatggaagttctttatgtttattcctattcctcctcttagaaagcctctcaaaacatagttggtatatacaatgtcatgcacaaccaaagtgtgcaggtttcagagaacctgagactaacgtgtgctgcaggctgtgcatatttcagacacctcaaacatcaaagacccaaagatggaacttacttctcggacaaaattaaaacatgagggaaatggatctccgtgtagacagaaagcatccttcctccttggaagaagttgggctgagctgttttacataataaacataagctaaaccaaataacatcagcacaaaccaaatagcataaacagaaagcaaaaccaaacgacactttgagagtggatacactacaactctcagaaacacatttgaagttatgattcacgtcttttataatataatgctcaacaaaaaaaaaggtctggttaatttaaaattgaagaaaaatatggactttcaactcattttgagatgttagaatgtgtgcctttcaaatggcaagagaaaatacttgcatcttggcaaatcaataataaattcagtcttcaatgtacttggaattaattttctttctatatactcctcttgcttttttgtttccttcagttttaaccgacaccaagaaagggatgaagtacaagaacaaagctaacaaaaatacacacctatcttcttagcttctggtcacagaagtaaatttatgacaaatttaatactagcttgagagtaactaagcccagttgtaattatactgctggaaagagaaattaattaaacatccctgtgataaagacccagcagcaaacctagaataaacacataattggtgaagaagaggggcttgaaataaaggagaagagaaaggaaaggcgaatgtttagcccatctgttcagatagtaatgaacgaggtaatcttttcaagagtacatggagtgcattacagtggaaatcagactacctggcgggcaaagtcagccaagtttctaattctcttcttcaaatcaaattgtgatttgctaatgtgaaacacatgtctcaagttcaaataactctggaattccaaccgtgcagctcaacgactgaaccagaacaaggggagaacttgtcaggatttaagagctttcagcaaagcccttcaattgcagccagcaccctattccccggaaggatatcaattatagatagtgacttgctttagcaggcagtcgggactgtcagacactagatagacaaccatgaagaatcatgaatctttctattaactgtaagagggggaaaaagaatgggtcacggctataaataaggcagagcatcagaatggtttaacaccttgcctcttggttgtatgtggcatgaaaattcaactaattcacaaaatgtcctctctccaaggaaagtcacaggaatggaaactgttaatgcttccctctgtaaaaaagtagttttttcctggctaacacggtgaaaccccgtctctactaaaaatacaaaaaattagccgggcgtggtagcgggcgcctgtagtcccagctactcgggaggctgaggcaggagaatggcgtgaacctgggaggcggagcttgcagtgagccgagatcgcgccactgcactccagcctgggcgacagagcgagactccgtctcaaaaaaaaaaaaaaaaaaaaaaaaaaaaaaagtagtttttgcaactggtatttattctaccaccaaagtaattaggtggacttgaagtagctattccttcaatcaacataatacaaagcacctacctattctataacaggccaccattactgctgccagatatactcatgggtaagaaagtacacgcatgtcatgcaatgtagaatcaatttaaacatgcaaacttggggttcctgcacctcagacagtaagtaaaaaggtggaaaataagtgacataaactagtattcttatttatgttgttgtaaattataattcttaattcatttaattaagtttatttactcatataatttatctcagactaaaattaatatcataaaggtaagatattagattttcttctaatcctgacatgaatttcttctggttaatctgaaattaaaatagtccactgtatatgtgcgcattcatattttttaaagaccatttcgataaaacagacaatatggtggtcatttagttggtagttttaagcagccttcctttaaaactactcagatctctctattaaaacatcgagaccatcggccactgaaattaaattcaaatacctgcaatttcaccatcttttaaaagctttcacattactgtatttaggttgtgaaagggttaagctactaccgcactccaaaaaatattacttcaaaccctgcctcttatgaggagcacaattcattttaaatgtagacttagaataagctcttatttcattcctgatttggtaatgactgaaccagtatccaacattccttgcaaactacaatgacttatcctccaaaacggcaccatgagactgtcaccttcaggatattttaaaaaccaagacaccctgccaacatctgttctataatggcagcttttacacaaacaattctcttcatgtttgttggtcattcgttatatcactaaggatacacatagcatatgctactctttgggagtatttccccataataaaacaaaaattccaaacttttcccctttgatattccaatgtttttgtgatttccattaaaacagtcagcaagaataaacggccattaagtcaggcttggcttcaaaataacacttgcattaaattaaagagaaagaatcgaattaagttcatggaaaaattctggaaatataccttaattaaaaacatttgactttttttttctgtgctcagaaatctataattcttcccatacaattaccaggagacatgatttaaaaagaaatggaggggagggaccctggcgatgtcatgtaaaatcctcaaaacattctgtatagaacagagctcaaaatctggcaacctgcgtgcttaacactataatgtaactgcaatgcgtggaatacattacatgggatgcgccgagttgcaagagacacacattaaaagttcacactgcctatgaaacgtgtgggatgtaagagggacttcataattttagtgtttaatctaaatggaggagggttatcaagaaacatgaattgcctaaaaatacagttactgtaaaaaaaagaatgtaccacgaaagagaaagtggagagagaaagagaaaaagagagagagcaggaggaggggaatcgcaacaaatgctactttgtccaatttttcatattaaaagtttaaaaaactgccacacttaatgcctcaacaagaccctgtgcttctgccaggagttgtagcacctgcatctttttattctcgatcatctaaatgccctccacgtcagccaatcctggtcccattttccagggaaaactccactggccttcaagaaagtgccaagaacagtgaagcactgggaagggggtatcacaaatcaggcatggggtggggagaaggctttgtgcacactgcattttttgaaatgatatgcaggagagtgtgtaaaaatttctgaacctggtttgggagaggaggtgtggttctcaatctgaccatgctgcagtttccaaaacatccatcactaaatacatttaaaaacacttacaactttttccatgaaactactaaccccacaagggctggcctcaaaccaagaaattatgctacctagctcatatagagtactaactgcagcttaaaagaacgggagcttccttaggctttgagagtttgggagaggaaaaaagaaatccctcatctccacattttttccattgttaccgggtcttggaaggggaatcaaacttgtttaaaaggttaatcataattcatgtccagcttactattactcaataaccatcaaagtcgctaactcaaaatagtgttttctggcttacaggatcagagtcattacactctctattgaagactttattgaattttacactcagctttagctgactgaacaggtcaagcaccgtggctccgagttttctttattctcagaaagtcataaagccctctccagttcgcaatgcggctcctaagaaacttgactcagctcagggtcagagaggctgacctccctggaaagtgtcacagagctgtaaagctcggttcctgaataccatccacttacgtgcacaagctgctcttgggtgtcgaactccctcgcgcagccttcccagtggcagtttgtctcatagatgacttcaggctcctgtttgctttcatctttgtccccttcctccttgacaagggttgttccttcgggctgttcctgaaagaagagggtggggggcagggaacagagaagggggaagaatcagacacaacaggagggaagacaagaagagaaagtaaaaacccaatttagatttgggtctagggttttgtgaagtgaagaagtcaaacaataaaatcatatctgtgcatattttcagatttaccaaatacactctgagagttttaaacgtctgattcaaggcaacagcctgtcaaaattatgaattaaaagttgaggtcaaactttgctgccctgattacaaagctgaaaataaacccaaatgtcatctaaaaaaaaacccaaaacaaaacgtaaaacaaacaaacaaaaaacaaaacaaagctcataagagaataaatcaaatcaggtctttacccaaaagattggtacttctattttgtttagttgttttaattatttttggtctgttactttgtttattcttatattttgtaatccagggaaatggtttactagtacttctaatgctgttttcgctgctgttggagactgtgtgagacacttttgtagactttatagggataatgccctctcgattcaacctctgatctctaaggatatgctcactacccagggcccaggggccacagcatcaaagctcaggggcacagtccttcctaaacccctgtggcagcttcacagcaatgccaatacaagtcattttgagaattcatcttgtgtagattcaggtcccaatccagggctagatgataaaagccatatgcaggcattgaagtgtaaccagcaaggttgttgctgtctggcgatatgcaagaggaaagatccatttcagagcccgtgacacaatttactccagcctccacgttcttgctgaaaaggaaatttgggcaagcagtctgaggtttgggctgaagcagcctgatgacagcaaggtccagattctgtggacatctggactcttgtccaatctctatggtggggaattagcattcatagagctccttcctgcatcaggctgagagccctatgagatgatattatgggtataacctacacatccttaaactgaggcccagagaatttaagtgactagaggcggagtccggattgaaatcctacactcttcctttcagaattttaggctgagtgccagaatccaactagccttaggttagttatgttttcatcccttctggttcgccaggctctcctagaaagtgggaagtagcaaaataagaaaaaatgatataggagccatcagtagatccgccacagctcaggcttgggtccaggagctcaataattcaggcccaaaatcacagatgaggactgaggcctggtcgcacctgtggccagcaacaaattaatgcaaccatttcctctacgaactacagttgccaatactcccaagctgcctaaactatcaagaaggtatgtcccgcatggcttcctgcactgcctgtgtttgcttctgagctagaaaaatgatttagtcactccatatctagccttttgtacaacatgtagagtacggccaaggtcaacaatgcagtggacaaggaactgccgtgaaaaagacaccaggtctggggaggaagcgggagctgacccaaagacaccagtcttgggaggagtgggcgctggcctgtgcggcctcggtgtcctacctgctgcccccgagcccctgggctggggaggtcttcatcgggtttgatcttggacctcttgttgtgcatcgggtcaccagtgctgctcactgcagactcactcgtgggcttgttctgctggtcacatttgcagagccagagacaaaaagattttcatcaacaaggagcagtaccataattaaaaccttgccaactcgggacaagcggtcttatttggctataaagcaatgactctgataattctccaatcccagtgtaagcagagttcagatagtatgttcaaagctagaaaatacgttcatgcggcagctcttcatttttaactcgtgagtataaactccctatggcttttaaaagctagaagaatggagctgaggccctaggctttaacaagctccaacagggtatttcaaaagaacaaagttgtgaggagggtagaagaccaacacgttccatttgtgaagttctttaattagagcaaccagattcttctccaaacaatatcaaagtggcaacagttaacgcagggcaaagcacagttttagtcttactctaaagtaccacctggtggtaagtcgcaactgtggttctagcggagggagtgaacagtgaccaaatgagagcaatgcatccacatgctgcactgacatgggatgcaggttacagatggcaccaggtcacagtgaagccttatcaagcagcctgctgctatgcccatgggaaaatgaccctgggggaaaaaactgtttgatgagaagcatttacacaacacgtccaccaaaactgaagactagacctcagcattaagaagacaggatgctagtacagaggctgtgagaacacagaggtgccgtgttgattaacagctgacgtggtggcctgcccccaccctcggctgaccagcacggccgggtgcatcgacctgtccctctcacctgtgaggactcagaagggccggagctgacctggacggggttcagaaccgtagggatccctggaataggcctctgtgttggaaaagttggggcagggtggatgagtggagggctgtgtccaaaggctgaacctaagctctgttgtcggcttaggatctgctgatgcatgtggagagagacgggcgcggaagagtaggtgaagctcaaggcagggctgcacgggggagataaaaaaagacgatcatcacttaaacgctgagctcagacaagtacacaagatctgcagctttctatctataattttaccatcccaaatcaaatttgtttaaatgagaaggtaggattattgccaagcatcttgaaaacttctaagagaaagatgaacactgagatgagacacacatgtgtgtgcacacatacacgcagacctaaaacaagattctgcaaaaacggaaataaaaggcatcagttcaataataactatttattgcaataacaaactttatataaaaagagaatgggtgactacatgctttataggacttttattggctcttagttccgtatgttcctgtgcatggagcaattcctttaatcttagctcacactgcacgctttcatatgtctccagatcttattacaagaggaaagaaaatcaattggttaaatgtgttttgaacaccatgcttgtcatatcactcatttgtttgtaaagatggaaagcttggttcatccagaatgccacctaaagaatttccatcagtgccgtctggttacagaagctgatggattaacctctccccgctgaaatcagtgatcaatgggcttcgatggaggaatattccagtgggagagcactgctccctcttctagctaaacagcatttaatgtctattaaagcccattatgcatgctaatgactgtcaccactttattatgccacactatttcccaggctacagtaagtcctgaggaagcagtgataatacctaaagatttctcgactagcaggcaatgccaaatcattctttgtgccagtgtggttctggaatcaaatcctcttaaaagaatggagtgttcttaaggaatttgccaatggcttaaaaatgcatgaaaaactaataattgcattcatggaaatttctttttaaaaaaataatcagtgaaaaaaatatttatatatatatatgtatgtatttctccctgtcctgctgtgtaatacccagaaagaatcagggtttcttgtaatgtcaaagttagaactcatgcaaatttccaatctggtgggttaattactatggctattaagcgcattaaaggagaataaaataattacaatagcaaaattcaaaccatttcaacaactttaagtaataattccaaagatatactctgttcattaatgtgactctacattttgcctatttgactacaatccataacaggcagcttcaatgggattacattactatcattcctgcagagaaccttacattacaatagcttgcccatttaagactgaatatcattaagaataccctaggagaatttcaccaggctttgagaaactctcctttcattctacattgtatttccttaataaaggaaagcagaaacgtggtgaaaacagtcattgttcacagtaagttagggagaaatcagtaataatattccgtttctgcagcgttatagttactgccagtgtttccaaaagcaagcatgaatgattatggcaagacttagctaaggtagctgtgtggatgattgatagggcattaatcaaaagatgcatatctgcctcagaatttgttcacaagctttcttctaatagctgatttcatgttcactgagctctatgccagtttgtccaatttatttttcagtgtacaagccattcatcaaaaaacacaatgatttaacagccccccttcctttgggtgaatgagtattactaagtgtaactacgttattctattcattaaataaacaaaaaccaaaataacccacttcacatataattaccatggcacaccgactttgcatgtatctccaaacacctttccagggttctaggagcctagactatctggcagagttgaaagagggtccctgaaggtcatttatacttctaattctgggagacacgacatttgggggcttaaaaaatcagtacttaattaaaaatagagaccattcagaaaacatgcccttgattttatacaaaagcaactcaaaagcattcacagacggataagggaagtgcattttaaaaaagatgtaggaggccgggcgcggtggctcacgcctgtaatcccagcactttgggaggttgaggcgggtgggtcacctgaggtcaggagttcgagacaagcctgaccaacatggcgaaacctcgtttctactaaaaatacaaaaattagccaggcgtgatggcatgcacctgtaatcccagctgctcgagagtctgaggcaggagaatcacttgaactggagaggcggaggttgcggtgagccaagatcgcgccactgcactccagcctgggtgacagagcaagactccgtctcaaaaataaataataataataataataataataataaataaaaataaagaaataaaaagatgtaggagatatccttacaaaagataagactcagcattcccaccgcagtttcctaggtctacgatcctccttgtcctcggggagcaggggtaggggttctgaaagctcttcacatactttggccatatccccattcagggcctccacctttttgctggtaaaaccaggtgacgggaataaatgttctctaaaatccacatcaacaattagactgcaagggctatgagggaacacacagtggacggtgatcctgagccttcagtgcttattcataagaagccagcaacagaaacattctcctcctcctcgtgcacagacctgggccagggcagggtatgggacagcttgtctggacccagaagggctggccctcgaccttctgctgctgctcctgccagggactgtgcgcaggaaggctgctccactccagatgacaaagccaatttagaatttgatgacaaaagtagaaagttctcagctctgacacagtatcacttaacagatttgggagtcaaggctcctctgctctcagaacactgccatcagagtgctggggcagaggacgggcgatgactgggcacagcaaacggatgtcaagagtcgcagacaaaatgcccatgagaaaggatgcctcccacgcataccctcaactctcttgggcaagatcaaggtatgaaaagattctcctgaggttttcccactagggggataagaaaacctgagccaccacagcctcctcctttaaatcaaggtggggagggccgtggaggaggggagtcctgcatccttttgcctcctgtcacagcatgagtccctctgcatcttcagcactcacagtgtcccctgcctggaacccttggcttccagagctcacaatggccacttccttttttacattcacgttccagcttaaatgtcacctcctcagaggggccttcttagactcatgccccatcaaaacgaggcccctctgcacctccttgccccatcgttttctactgcgtgacaattctattctcatggcagcacgcagtactctctaaaactctttctgtctctctgtctaggaggcaaggtccagctgggccgggcagtgtgcctggcagagcagacacgcagtactgagtcaatgagtgactgaatccattcttcagtgtctattagttccctgttgctgctgcaacaaacagcccaaactgagtggcttaaaaaaacagacactgtttattaccttacagttctggaagtcagaagtctgcaataggccggcggggctgcattattccagacggtctaggctccctgcctgttccattacctggaggctgcccacattccttggctcaggggtccacatcactcaggcctcctcctcctcctcctctgaccctaacttgcctctcctgcttccctctcacaggggaccctgtgattacatcactgccacccggataatcgaggatcatcttctcatctcaagatccttagcttaatcacacctgcaaaagtcgttctggcatggaaggtaacctattcacaggtcctggggattaggatgtggacatctttggggccgttatcctgcctaccacactcaaaagagtcacctcaaagaaaactatgttttcctctgaaaactacaatttgacaacatgtctgtaaagcagtattacacaaacgaagctagtgtctacatccatttctttctgcagcacttcaatggcacaggacagactttgctgattaaagatatcagaattaaaaacagaaggtaaattctatttttaggggccctgaataagaaccttcctaaatagttcatgtattcattccacaatttcctacaaatagaaattattactattgttgatttgttttttttttttttgtttttttgtttcttgttttttttttgagatggagactcgttctgtctcccaggctggagtgcagtggcacgatctcagctcactgaaacctccgcctcccaggttcaagcgattctcctgcctcagcctcccgagcagctgggattacaggcatgcaccaccatgcccagctaatttttgtatttttagtagagatggggtttcaccatgttggccaggctagtcttgaactcctgacctcaagtgatccggccgcctcggcctcccaaggtgctgggattacaggcatgagccaccacacccaggcatagttgaaattgttaataatctcttataccttctctagagcaggacataatctacagtctaaaccttggtacctgtgcttcccatcctcatagcctccatgtttctgttcaccccactctttccaatgagtcaccagaaattaattttacattctgattctgaattctctgcattcaacaattaatctgttattatttctaaaattacttttatagcttttgtttctaaataactatatgaaagatggggtaatttaagacaataacaacaaacatttataaaaatgtgacctgtaactgttaatctatatttagtcaataagatcagtagaaagaaagtgttagatggcccagatcttcccaagcaacgtgctaacacagtcagaggcctcctgaggtgagtaagtgtaatggagagaaagagaaagaagtaccaaggtcatcaaactcttaggaatacagcccaggcctgtttctctgtgcattcctaatgtccaccccagatacaggtggcagcaggatgtggaggagcttccagagaccagtgttcctcacaatacactttgagaaacattcttctagggcaacaattataaagccagaataaattaatttaaaagttaatttgccctttattttactgaagagcagacaaggagaaaaatgtggttgttagatagcttactaaccagagcaggtgtatggtcactggattgttagtttgaaagggcattccactggatgcagggtctaaataaggataatttctcagtcagtttcatctccatattcagctctgagctcagttaaaagtgattaacaaaccgttgtctgactgggaaccattttttctattttacgaagacttcaaaataaaattatcaaagtctgaatctttaagaaagttctgatgtagatatacatcagaaatcagacatataaagttttgtcaatactcttaaaaagtgtgatcaaagtttgcaaactggttcttgtttcttagcattacagtaaacagcacagtaacacctcacttacatggaagtctcccttctgggaatctcaaaaactatacccaatagggctaaacagagtacaggtaaaaggaaaactgctaagcaaccaaaataaatgtcctaaagtctacacactgcatctcattcattaattcagcaagttttaactgagtactttatacaaatcccatttatattgccaaagaaaaaaaaaattatttgtaaccagaaagttacatataatttataattaatacattaaacctggaaatacataatcatgtttggctttcacaataaatatttatttttttcacaccaaggaagtgatgtaagtcaacatttgtacagaaacccttgtgatccattctgctaatacaatttatatttattcccaaaataatatataaaatggaaacacagagttcatattgtagaaaatcaatcattaaacatttatttaccctactatacatataggcacttcaaagtcattaatattcaaatcaaatggataaaacccaattaaaacagtatatgagaaaagcctatgttttttaaatgcttcaggaattctatataaggcaggagggtcagagcgctggggatatactggattccttaacaatggtactataaataaagcagcataatatggcttgctgtagccctttaaattggaatggtaagtaagagctgattacaatattcaagaaatttgtttttatataaaaataaagaaaacaatagaggaaagtacgaaaaatgtcaagaggccgtatcatccagccaccacacacttaaaggtaaaagctactattttattgtttgatgatttcaatccacaggacattcttaacccttccctaacataacagcttttcctagagttgccatggaatatctcactcccatgtaatcacagtgccagggtttctgcaccagcacacgatatatgtggggaaagggcacaggaggatgtaggaagctgagcagaaaggaaggctcttcagtttccaggttcatctctgaaatctctcaatgacccagcgcggtgtgcacagagctgggcaggtaggtgatgcattagagaactaagccacaggcaagccctggcgtgagtggtaatcacactccatcacaaaggcgccagctctcagtccaatgtgaagagtaatgaatatgtggcacttctggattcttgggaaatgtcttgtaaatgtaaaatcaactctgtctacccgccacctataaaacacttcttccaattgctttggttgttaaatttcattcaggtttgaattttttcaacatccttaaaagaaactcatgtgatagtatcaggatgtattcctttaggtcagggcactggaattaagaaacttcatgctacaacaaacctagtttactacaggccgaagaagaatccaatgagtatcccacctctcctaattcttttgctcatgaaatcaagattggaagtaaagtcaggcaacaggaaccactgagatgacatggtaccagaatgtgagaaactgacttcaagaaaagagaggggagagagacacattcaaagccaagccaaacttcctggctactttgtgactgttgcactaagaggtcatcctcactctggttacagctgtggaattcactgcacaacagctgccatccaaagaaccattttttttttccagttttgcagagaatgggccaacagctatcattacttgtatatgtgtagggacacacatgcacacatgtgcttctatttgagagggaaaaaaataaagcttccacttccatctataaaagtttccagggcaagtttattggaaacccagcccagcctcagaagtagagtacacaaagacccacatgctcttaagtatctcaacatttacatttaggcatatgctctctgaataatgctttggagaaaaatacattaggttttacattatgaaactgatctaaaaagctaaaaagctacttgccattaagcagccaaatagatatgacctcaatgaacgtgaatggcaataacacactcttacatgagatctggctcatcaggtatgttagatgtggttagaaaaatcatgttaatatatgcataatccgtttcttcaaaatatcatcaggtattattatttctattataaatagcatttcccgccaatgcttttcaccatgcctctcatttgaggatttctaagagagaaagaagtgtgtctggtgaacactcagagttcgacccaccaggttgaatttgtggttctgccatgtgagtaactgagtgcctttgattcagtctgctaacctctcttaacatcagtttccttatctgtaaaattaaacagccttgtggggggcctccagggaaggcccttagatttctgctcttccagatctaaggccccagatcttaggcccttcctattgtccttagatatgtggtccaagatgctgtggtataacttggaccctgcctgtgtcgccaaccttgtgctttggctaacctgccccgtgtttaactgtcatctgctgacagttcccccaatgccttactcctcccacctcagggccttcacctgcttggcctccttcttagaaacttgtagaaagctttccagggtatcttgtcatcatcctataagtcaatggccaatccgctgaattaggcccgtggtgctattctttcttaacatctgggtcatttcctttacagcactgaccagaacccttaccagctcctttgctcctttgttcattcatttgttccctcactagctcttttgctcattcattcgtttattaatatgcttagaggcttttcccttctgtaagttccatgaaggtgggggtcgtgtctctctcaggcatttgtgtagcccccattcccccagtacagcgactagcacagagttaagctcagctaaatatttggggaattaataactgattaaatgaaatactatataaaactaactaccacttcaggtaatattaattacttttaaggaagtaaatgagagctatctttttaaggtagtattaactactttactgaaaatcggggaagggaatgtcatctccaaatttttagaagacagaatgagaattttaaagacgtcggtaatttggcactgtatttatctgtttgtcagtatgtttctcaattcatttgtgtgttatttctctgacataagcaaggtgtttactaagcacagagccaaggagctatggaggccgagctgacttccaccctgcctcaggcagcatcagtggacctgccagatgcacccttactccagggtcctagtgtcagacagggctgatgatccacgaaacagaaagcacaacttgccctctcatcatcaggctgagctcatcagtgttggcaacagaaaaacattgcactgttttgtgacgctggagatcttggcactcagaggggtgatgtgcaaaatgggaatgtcattttcactgagatctctttcctggtcacaccagaattaaaaccactaagaatataaaaccactttcattgtagccattaaatagaaagtgagaaagtgatacccagtgggttagaaatgcgtagagtactcatttcttcatcccatttacatttgccggaagactacagaagaagggggtcattttaaacaccttctcttccagtggtggcccaatttcctagagagaagggttttagcaaaggtacactattttaacctactgtgattcactggctatttacaacgttagccttaactatgtagagtgggggttactggctgtatttgataaatataaattatctagtcttagatggggagtcttccaggtgatggagaagccacaacttcttgaaacatgcaatattttataacatactttccaatgtgcatggagttatttttgaaagctatttaattatgagattttaaaagacttgtcaggtacgtctagacaatgcattttaaaaaatctgacataatcaagtactgttataatatgtcaatgggcttttgtgaataaatattagttttatatggtatttttatagtagtctggattattaagtaaatatataaacaaaagaaccacacacaaacttaaaatagacatttgcttttttaatcctttattttctattcacccctctggctctgtatctatcaatctctggccatgtaataatataacactcatacagattgcaactttcagaaagccagaattattcatccaccatgtagaaacttactttaataaggggatgatgagaattctaattactcatgagagagctccttaatttatttactcaagaaatatttactgaatggcatcaatatgagagaatgcaggtgtcacaggggttgaaacaagaggtacacagtgattggctttttggtgcttgtgttctattggagagaaatggatagcagactactaaaggagaaagaaaatatggaaacgtcaaatagtggtaaatgctattacaggcgtctttaaccacatttgcactagggcatagatgtgaaggagacagctatggcatttcttagaaactgaatgagtatctttaaacatttaatgacatgtttagaaatgtaaacatcattactgatgcactgccaataccaacagcaaattaggtattagaaaacatgtaagtgtgaaagtcaagtgtgtttagagtaaattaacaagcaggaaactggagtgctagtgctgatgcccaccaggcacggaactttgctaacttcatcttgcaaagacccactgggcttatgtgtaaaacaagaataaggccaggtgtggtggctcacacctgtaatcttaacactttgggatgccaaggcgggtgggttgcctgagttcaggagttcgagaccaggctggccaacatggtgaaacccagtctctactaaaaatacaaaaattagctgggcacagtggtgggccactataatcccagctatcgggaggctgaggcagaagaatcgcttgaacctggcaggcagaggttacagtgagccgagatcgtgccacttcactccagcctgggcaaaagagtgaaactctgtctcaaaaaaaaataataataataataacaccacttgctttgccaaatagctgtgacgtgagaacggtgagtgagcatgagccgtgcacctgccctgttagtcagcatgtcgcagaggctaaacgcacctgaagtcgactttctctcctgtacctttcgctgttgagaaagttagttaccttttctagatgtctccttgcttctttcctttcccagatcctctggtgctaccactaactgattattcctgaagtcagtttttagatctcagaaaatgaaacttacagcaggagtaagcaaggcactagcactcctccagctaaagaactggcaagtggtgccaatgataacaattattatcatcattatatgggaagctgatctcatcttgggttatctgcattacctgctctgtgtaagaatagacatatagtcctaaaatacagcaaatgtgtactaaagaaggagagattgcactgagagagaaaagatgcaatcgaaagtctcaaaggcaagaaagaaaatgaggacacaatgggcccaggcacccaactgtcacagcctccaaggacctgactggtctttaagtgaatctcttcttccatctctaatgatataaagagttgtggtatagctccttggagacgaaatgggcaatgatgatttcaagtcagcagattgacagtctgttaagtactgtcactagcttacctgggtgaagatgaggagaccaggagaccgtaaggactaaggaggctggggtaggaataaataaagatagcatcatgaccatttctataccatattctaatctatgtcctttagatgctgtaaaaagtcaagagacctgggcagagagcaagaggaaagaaaaagtaaagagaaacaagagaagtgaatgttcatgaagtgattttgtgtgttatctttctgactatcactgtgtgccacatttctgctacttggatgctatgactttagtcatgccatgtaataattgcacaattgcagtaaagtcgcctccagtccatgtcagtctatgacccaggaatattcgccaggagtgcaggagcagccaggccagggttctgagactggcatgcttcctcggggccagactgggatggagagcagtgtagcatagacagccatcacaggatggctcctctcctggatgaaccatcccagctcagctccccctgaaacttcaccccaggtaggaatctcatcctgccattgcagatccacaccagctttagtaaaatgtgcattcttcctgtatagagggtgtcttatctgtagtttacagatgtgaagactaaacttcaaagagctgagaggtaagttaggtttgtatagctggttggtggcaaagctggaatctgaccatagacatatccaactctaaagcctatatttgtaactacagtggttaatctggaaagtgccccaggacccctccctgtgcactgactgctatcacagttgcttgcagctatccacgtttccacacttcagtgaccatatgaaaagaacaaagaaaagcagcggaaaatgacatcatattaaaattaggatttaccacatttaaatattaacttgcctactgaagaacattgctgataattgaacaagaattaaaactgtaatggagaacattagggaaagacaacagtattcattatttttactaaatgtgggtatcttgctactgcaaacacttttttttctgaactgatgaagtttccctaattgtaatctaccatggaagacctatcaatgaacaactaacgctaccgctcattcatagaaacaaacaaaacctcacttattaaaacaaaggctagtgaaaacatccgttagtatgtacttttcaagcaaggaattattcacaattaacaaaactacaattcaaaaagattgctagtaactgaattcttaaattattggcaaaaaatttaggggaaatgagagtttaaagtttataaccaggattgctaaattaattaattagagtactatctaattctatgtctcaaccatttgtgagctggcttagttcaaacaataaatgatcaggtaattcacctaaaattcatatgttggcttacttttattccctacttactgacatcagtccaagttgatcattagcagtaagaaatattttatgttaatcatgtttacaaaagtctgtgcttgtaccttcacatgcaaaaacagacatgaggtgcttcatggaaggaagtgtcaaaacactttctgtcaagcaaggaactatccacggttaacaaaggtgtatggtcaaaatagggatctttcagattaagctaaaaatacttaatggaaaaacaaagaaatattcttttgccagatttcctctgatatctatgctttccaatgtcatctgcacttattttccatcagacgaaaagtcctgctgtttctctctccctcccatggactcctttctcttcagagttgtaggacaagacttctgccatgactggtctttttatttttgttcatgttctgtacatgtgtcatacaaccaggtatgaagtcagttttcctctagagaacattattacaaggaaaaggctggataaaaagatttgccctacttactgtctctacgaagtggatttcatcataactcaataactgctatttctatataggggctattgactaatgtctgcaaacacaaaataatctggggcccaataactggttttgcaattcattgtgatatttgacctgcctcttggtataggcacagcatcatgcacttttattcttcctcataggcagttggtactgaaaatgcatcactacaggtgcaaacaagtgctgacattacatttaaaaaacacataatggattcaggaaaatacatacctgattgcacttgcagataagtgaccataggagccacttgctgaagagctgctacgggaattattgagaatcgtgaccaaggagttgggagacgtccttatcatggtctgaaggtcaaagctatgatcggagagtggtgatatggacagtgtacgttttcggctcggcctggctgacagcctggggctggagaatctggtgcctgttatataaacaaaaaagaacctaattacctgcagttggactctataccagctatttattgctacttgcctacgtggaagaagtgaaggataagaagctggcaacttgcggtgacaagcacctctcctcccccatgtgatctactagctacagttgaggaaactagggagaaatatttgtcttccaggggcttacctcgggggagctctgtttattaatgtgcagggaaaatgataaattgctaaacaaaagggagagatttttatgtgttatccctttcatttctggtgatttatgaatctgacggctgcttagatattcccatcattaattcaccacaagcgacaaagacagtggttcccacaatggcaacataccaccctccccaccccaacacacaccattttaagtcatgagccaaaggaaggaaatgaattaaagtatcctaagattaaaaattcagctcagttatgccctcagtgcccagtgatttctagagttacctgctctatggtatacttaaagcattactaaaacaacttctacataattaccctgaatcagtgcttctcaactgagagcaattttgccccccaagggacacctgacaacatctgaagacattctggttttcgggactcagcagatgctactggaatctagagggtagagtctaagaatgctgcagaacaccctataatgttcagggtcaccctccccacaataaagaattatctggcccaaatgtcaccgaggttgaggacctctgccttacattccccatataagaggataaatcccaagaaacatttaaaaggtggggatgttgcttgtttacagattttccaaggcagaggagaaacccttacgagcatgataacgaggtacaatgaacctatagggcattttagctcttctctggaccttgtttctctagtcagacccaataaggggtaataaatttattagaatttttaaccttcaagaagattccactgatggagtcttaacctggagtccaaatccggaggtgagtaactcaaacttaaatgcatgccaacttaatacaatggtttcttcctgaagagttcaaaattaaatgccaatttgcattcaaatttggtagatattagagatgtgagcttcaagacacagagatgaatgtggcccacaggtccattctgcctttttgaaggtcatatttacattacagagtcatcaaactaaagtttaatgaacgaatgagaacataatctcaccacgtaggaggcaaacaaaacatgattagttttaagtaaaatgaagagtttctaacacctcatagaatgagtataccagtttataggaaaatggcaattttgcggtacccagaacaactgaagtagcaggtaatctttctttatttaaaaaaaaatgtccaggctcttggtctccagaaaattctttgggaatattttattcaataaagatggttcttgatacaagataacaatccaacatgcttagagatcatttaattaaatgggatagataaatatgaatgacttcattgtcaatactatagaaataatgaaaaaaaatccacaaactgaaatttactaagttagtgccatccacgtataaaacttaaaaaccaacttgaatgataaatgtggtacctactcaaatttttctttcaggcacaactaaaacgagttccttcatttagaatagtttcattaccagcctgatttagagcatgttagcacaaaatagcaatcccaacgatttcctttttttttttttttttttgagatgtggtcttgctctgttgccaggctggagtgcagtggcacgatctcggctcactgcaactctgtctcccgagttcaagcgattcttctgccttagcctcccgagtagctgggactacagacacacaccaccacgcccggataatttttttttatttttagcagagacgggggtttcactgtgttggccaggatggtctcgatctcttgaccttgtgatccgccagtctcggcctcccaaagtgctgggattacaggggtgagccactgcgcccacctgtgcatatttttaaggcatttaaatcagcatcttacttttataatggcatctgccttattaaacacaactccttcacatttactcaccatgagaggctaatttcatcatggaagtttttcaatgaggaaatacatgtcacttccaagtgacaaaccagatttgttatcaacttccatataatcctggacaataattgcccttctcaatggtactcagtgatcactggcaaagttagaagtgacagcacatgctagacaggacgtggatatatccctagaaaatctctaatgttttagatcactaattgtgatgcaaaaggaagaagcccatttgatgctctcaaaccctaggagccttagatcactctcacatcctccaaagagggtgaggggcctctcaagaccttttcaccctttccatgaaaccctttggcttgctcatagcctggctggaacctttcctctctgtgtttttccctccaagactggctcttatttaagtctatttccaccaatataaatagtggtcttcaggggccctcatctctagaatgttccttatagggagtatttgttctcatcttttaaggtcactccaacactgagaggtagaattgggaccataaacagactagtttatcctaacaagctacatataaacactctgtcctacatcttgctgaaacctagacgtgcccactatttaaaagtcaggtgcttacctgaacccagtttattgagggttgtgttaattaagaagtcctaaatatctgtaacaagggatgaagagtgaccagatagatcccaggtttcgatctaccactgcagatggacaaccactataaaaatttaggattaatgtttcgcttctttgttggaaaaaatctcctatggtggaaatttctgggcaatcttcttatattctaactaaataactattaataaatgctacttcaattactttagaggaaaagaatatagtgccttaagaactttccagccctttaatatgttcttcccaactccttaataaacaagcaaaagaagagaaagtcagcatttggggacagtgatttgggatactctgttgaagggagctgctaaaatacaaggtaagcattttcagaacagccaaaagagaagtagcccagttcttcactgatcataccacttccttcttaaatataagccagagaattcttattgttctaacacagatatctccgatctggctttctgttaattattttgtttccctattctaataagaaattctgacaaagaaaaaagaggtttatttttatgtgatgaatgataggacatctaaattcctacttaatgacaatcaatttaccatatactcaggcaaattaaaattcctttaattagtttttacaaagtaaaagggtagcttcatcctttatttagataaaaaccgccactgcctgactaaacacattctcatcaaatagggaaagtaatgcgggctgaccttccaaggattctctcttattttaattctttatttgcagattttaaataactgatttgcataataacacaacttttttttcaacaatcgctaattgaaatgtggttatgatgaatctgaaatgtaagctctctatgctaaaaagccaaacaacagaacgcctgaagaagacgtaacacatttcttttactttccatgtagtaatgagcttcccagtggaaaccaacagaatcttgtgttccaatgaaacacacaaaggtagctcttgatggtaagcagactaaggctgtagagtttttacccctgtatgaaataatcaccttctttctagtccgagactcaggactaaataactagaggacatatgctcgccctctgtcacagaagaatccaaatagattgtaaatggaaaagtgtaagttaattgctgctactaggaaaaacaaacaaaacgctaagcaaaggccctactcaaagtcatactgttgtcctattcaaaggtagtggcttttgctgatgtatgacttggatgatgctttaggatcacttcagagcgccttgcaaacggatgtgtccttaaaggatctgaagagatgagcgctctggaatgctctgatgagaggtaattataggcttacttgtctatgcgtctacataagtgacccacaaaaatcattacacacctaagggaccccaaaataagtgatacaacatgcatcaagtaatctcaccttattccactgctaggtactaaaagtagtcccttctgatttggaaaaagtttttattttttccaaataagctatttggcaactattgataacttgataactattctgatcctttcatatattcagcagctacaaactgtcttagtggaatacaatttttttaatgtaaagaaaacatatggggcaaacaatcatttaaggcaaaaatgtaaaacctgttaaaacaggtattttttaaaattaatttttaaagcataaaatccatgaaaccaaggagtggggaggcaaagtccatccatatatcaaatccattcccccttattttgttatcaagacaatcacgacaggaaaaaatttttttggtttggggagacagggtctcactctgtcacccaggctggagtgcagtggcgtgaccaagactcactgcaacaccgacctcctgggctcaagtgatccttcagcctcagcctcctgagtagcagggactacaggtacatgccactacacccagctaatttttaattttttgtagagatagatctcgctatgtcacctgggctgggattttttttaaccagctaatatttatatatcgctgtcaattacaattgcctgcatctgtcagttcactggtatccttgagctaaacagggggtctcaggatgtccaaatctgtggaagcttctagaaaacgaagggaaccagagcaccagatagtggtggttccactttctcctccagatcaaaaagttacacaatcacctaatctttgtatcttcttctctgtttcataaagttgcctttgccatttcccaagactctagaaaccagccccgtcacttactatccatagcatgaagatattccatgtggatggcccccgtgccggcggtggcagctgagggaataatgtctgcataggggctgcgctggccagttagcagggccatctgatgatagtattctgctgggctgactcctgcatggggcgctaggaggagacaagagatgtatggttactagcgaaagaaggtcaactagaagtttctcttgaggcatctcagagtccattacacaacccacatcagcaattccttttatggcttattagagtaaagctcctttaactcaaattgtgctcttacttccatgaaacatcttttatttgaaaataaaactgaaggaaaggaatagaaaaaagtgaaatgcattactaagtttttgttgttggtctaagaaattatcaacaaatcagaatgattaaaatgtatatatgtacataaccacatttgccccccaaataaaatcatttttatatcaaatcactgtatgtttgcatttcttacaatagtagacaacttagaagactatgatatctttccagacatacttaaaatacttttctaagctttctgacaagagtgtctgagttaactctcactcacatgaaaagtcagggtttaccagtatgaaaaaaggcagcacagctttaataacacaactgaatgataagctacaattttacattccataatttaaaagctctcttttccttttcttcattacaaaatcaaaaagaaaatatacctatcaatctggagcaatttactgccaagactcagctttctaacaggataatagtcggtttccacctgccaattttcgtgcaaaagcagcaagacattgtagcagttctgagggtggcctccagactcatagagatctggatttaaactggctccatgaggtcgtcaggagcaaaaattaaattatgtatgtagcacacttagcacatagcattcaatcaataaaagttttacgattattatctagaaataccagcactctagtgataggtttgtgggtattttatatttgtttcatatactttttatccatgatacatggtaaagatagagatttaaggaaaaaaactttaggccacaagggaaatatttatcatgttactttatttgattatattaactggattcttgagaggcaagaaaaggaaggcaaatgaaccagtcaaagaatgtgatatatatactcgtcatcaaatgctacacaaagcagatgataagagtgctttcagtagtttaactcgtggtatgactttccactagcccgaataaatttctgcaggccaggcataattccaagtccattgtcagctagcctccctctctccctcagtctattctccttgttagtcatttccaccaactcccaaggacttgaaggagatgattctccagttcttcaagtgcaaaataaaatctgaagcagaaaatctaattcatatttgatttttatttttaaaatgtgaatcttggccaggcacagtggctcatgcctgtaatcccagcactttgggaggtagaggtgggtagatcgcttgagctcaggagtttgagaccagcatgggcaacatggcgaaacgctgtctctacaaaaaatataaaaattagctaggcgtggtggtgcacaccagtggtcccagctacttagggggctgagacaggaagatgacttgaacccagcaggtctggggtacagtgagctgagattgcaccaaggcactccagcctggggaacaaagtgagaccctttctcaaaataaaataaaatgttaatcctgcccaaagggcaaaacttattctttagctacctgtattactattattaaccagtaaattcaatgcactgaatcaaaaaagaaaaaagtggctgttactgaaggaaagctatttctgaaaacccaagtgagtggatgtttcctgagacacttcatgcagcttctcaccatgcacacccagcctcaggaaggcgtctacctagagaatgtggatagggcatggaagtcgcatcaagcactgctcagtgaaatgaaatgcctggtgtttctctgatgtggaacaggcagtggtgatttgcgatctcttgcaaagaattcagagcctgctacctgtaattaataggtgatgcaattctggaccttgattcagattccagtgattattgggcaagtgaattcctatgtgtgcgtgatatggaaaatacttttcctgaatcaaaggaccagtttataagttgacaccaggagaatacacagctccaattaagaagagtcatgtggaaagtaatggggggactaacagaaccaacaggaattcgatccttaagagcctaaaatgagcaacaagtataagaaagtctaagctcatttcctttcccagtacatacttcttcggattttcatgtggcatggtcaagaatagaaagcacaggcaacagccctggaccatgatgttttctaagaccttgccactcagagtgtggtccaggcaccaacagcactgacatcatcggcttttgaggagcacagaatctcaggccccacctgatcccacctgatgcagaatcacgttttatcaggctccccaggtgattcatagacacactagagtttgggaagccctcctctaacagacgcatctgtataaatgtgctcagacacacagaacagaaaagtgttcatcagaaggtgagtaaaacactcatgttacacatgcacgtgtgtgaatggctacaggaccagtctaatcatatgtgaagcagcagaacagaaccctagttaccagcagggatttgggaatcagaaacattttcaatgaattccacctctgccccttactagccatgggattgactgcgttgcaagtaaaccccactgcacgctgctattctgacatgaaaatggagataataacaccactgccaatgaggtgttacaaaactgaaacgcaatcatgcatgtaaggcacagagcacagcgcctggcacatgggaaacactcactaaacatcaggtctactttatacacgtcccgagtgaggagcggggaggaggctgcatgatctccagaagcagaatccatcctggacttaccatctgtagggctcagcccacgggttgctgagatcatggagagcgatgggctgctgtgcaaggagcggatatagtccatgtagggattaatgtagggatgtggagggctgaagggagactcggaagcagcagtggggttccggtgtggggagatcctaatgaagggcaggtccggatacgtagggctactagataaggcggaagtcctgggtacaaagaaaaccagatacaaggggtatgcatgagacaaatatctccacaggcagaggctgtctctgaaagaaaataagtaagattttaagtgaattcaaaggagccttgtggaaaaaactgcaggcaaatacatattagtactattattttaaaatcagcatgatataatgcaggcagagcatcgctatgcaattgtttgggaaaataaattgatctctgagaaacttcattgcactccaaaatagtaaaataaaggtcaacctatggcttcttccatgagaagaaattctaaataacaggcaactgggcttaaagtggttgctacaattgtattttccacttgacccaaatattaatgttaccatttaaaacttacctcttactagcatggtgttgcataaaaataagaaagaaaagaaaagaaaaaagaaagggaaagaaaagaacagaacagaacagaatgaaagaatacaatcccaaatttgtctggtctggaagcctgatcatgcacatggcagagctgtccgtaaggaagaagacccattgcaaaagtctgcttagaaatgggaaatcggtcactctaaagatccaggcacatgtctgtttaacttcccagggcctcgcagtggtaagtaaaatgacttttatggatccaggtgtgagtgcttggaaggcaactcctcccctttgtgcagcagcacctggaatcagctttctgctcaagcccttttccatgaggcatcccgatgagccacgttcagtgagcagtagcaactaagtgctcccgggttagaaagttggggaagaatgcattttcaatcaagcccttgcgtcggttataatgagctaaggtagaatgtaggcttttggttaataaaaataaattctaaaacacaccttgctaccacgatatcctgatctgcttctggagagagattcctcaaaatcccctcacacctgctgccccatagccacagccacaccctgagacagccacttctagaatggccagtctgcataacctcctggaccaccaagttccttctctaacggaaaacatttggcatggataatcagggaactggctctgacaggttaaacagttgtgctccccgcttttcctcattcacagagggtgcggccataggaaggggaggccctgatagagagagatcaactgagaacagcaaattcctcttccaccactggctttaggagtgaaatgaaagggagggggaaacacattttctccttgcaaagcaaatgctcacgcacagcccggcccccatcaccctgtcagaatataatcttggtaaaagccagctccactaagtgcacagcgcagacactgaaataaatgaaatcagagatcagataatgaattttctctcagtagaaaatgaaagaagttgaaatatggtggtgggggtggattttctcactttctccttctgactcttttttcattttgaactaaaaaaaaaatgaggctttttatttgttacttagatgctactttgggaaagcaaaataaaaatccaaagttttctaaatttacacatgggaagagtaagaaatcaccaccagcaaatagctatttcttttcaaaacagcttgaggctttcacacccaatcagaaattagtaaaatggcttgtttaaatagaaatcaacataacctattagtctttcctattttagctctttactacaaaacaagttggctttctgttctttgttaactcagcccctaagctccatttagacgtgtccgccattggttaaatcttacaccgtatttagatgtgtttgctaccttagaaggtacaggggatgctctaattcattcatttattcttcacaagaaaggacaagcaatccttccaatctgattctaaacacagacttgtttatagatttccactgagggactggtgccaccgaatgcagaagagctgtttcaagaaagccatgagatgacgcctcctgggccagcttttgcaatccaggaataacttggtctgagcaacatgaactaaacatcagggtgggcagtgacatttcttactggcttttcttgatttacccaaagattgaaacctattatttctccaaaattccagagttgagaagagtggtaagaatatccctagaggtccaaattctattttggagaattatgcacaggaaaaccaatcagcatctagaaaaacacaaaaattatagcggccaggctagggtggtcatcaatcccaaagaaagcctaggaagctgttttctcctcacaaaagtctatcaagtctgatgtccctgtcactgcttcacttggattcaagcctttcccaccaggacactgaaggtacctactaaaccagcttcccacgagtgaggctccaagacctggtcatatcttctctggcaggagcactgggctctacggtccttttacatactgctgagaagcaacagtggaaaggagggttcctccaggatttgaagataaagatacaggtgcatcaggcagtcataagggggtcatcaggaattctagatacagatgtatccaagcagtgggactcaatgtgcgtggacctcagccttgatactcaccttctcctcttccttaaaggtccaatggggaagataacctcgtgggagtcttaggaagttgacaagagtaaagtctcatgtactgagcctagtatatactgaatgctcaacacatacacacacacacatatatacaaatatacacatacatccatatgtaaaatcatatgtgacatatacatcacatactgtgctaacatattccacccataatacacatatacacaaacatatttatatacacatgtgtatatgtacacagatatatgcacacatataaacatatatacatgcatagtaggggtagcaaatgcaacatactgtgtgatttcaaatattgaaatattaagacattctttttgttagcagactttgtttagagcaatttaaattcatagcaaaattgagctgtagtacagagatttcccatataacccccacccccagcctctacatataaatagcctcctgtcattatcaacatcttctaccagagtggtgcatttgttacgagtgatgagcctacactcacacatcatcgtcacccaaagtccatagtttagggttcactcttggtgttatcctttctacgggtttgggcaaatgtatctaccgttacagtatcatacagagcagtctcactgccttaaaaatcctctttcaccaattcttcccttcttccttctcccagcccccaaccccaggaaaccactcatctttttgccctcgccatagttttgccttttccagaatgtcaggcagtatgtagactttccagattggcctcttttacttcgtaatatgcatttaagtttcctccatattttttcaaagttcatttccttttagcactgaataatattccattgtatggaatagcttatttactctttcacttactgaaggaaaacttggttatttcgaagttttggcaattatgaataaagctgctataaacatctgtgtccaggttttttgtgtggaagaatcccctttccatagcaaatctgatcacaccagtcggctttgctcctctccctgacagcaccttggaggcacctccttggattttccaggacctcccttagtaaaatcataaagtcacatgaggtggttaagaaaatgaagtcagtaattaaatgcaagggctttgaaggaatgggatttgaaggtttcttcacttattccctcactcaagcatcagtttccttatacacaaaattggaacaatcacagctccctccaggagctgccgtgagggctgaaatcctgtgtgtaaaggtaggaacacagtgcctaagtgctgtggttgttgatattcttgtagaaccagccaacaacacttcttttcttctgattctaaactcagaaaaaaaaaagtccaaatggcgatttgttccctagcggagcagtggctggtattcagtttctcattaaaatgtggtcacttattaattgtttccacattaggctctcgtgagctgggttagcatatttctctaatgctaaagtgtgacaaaaatgagtttctaagcaaacaaagctgagcatccaaacttcaactaccatagccaaacagcctcctgacatgtaaatagtctttaaataaaggtgtttttaaccttacctaacggagccatcttcaaattcttggcagctagatcatttgtcagttattgtggctttgttttttgttttcgagacagagtttcactcttgttgcccgggctggagtgcagtggcgcaatctcggctcactgcaacctccgccctccagggttcaagcgattctcctgtctcagcctcccgagtagctgggattacaggcatgtgccaccatgcccagctaagtttttgtctttttagtagagacaaggtttcaccatgttgattaggccagtcttgaactcctgatctcagatgatccgcccgcctcggcctcccaaagtgctgggattacaggcgtgagccatggctcccggcccaattattgtgtttttaactggaaagcaaatctgggagagaaggttaagctccttaaatttatcaggcagacgtgtgttcactgctatgtgaggggcactcaggattatgaccagaggagggctgaattccactgaaggaagaggacaggggaggtatggagaaggcggccacaaaatttcccatagaaatgacatatattttcctacaaactatcatcaacttggcctggtaaatatttgtcgagcttgttaaaaatcttcatttgaagattaaaagtagtgccaggaaaaaaactgtggtgtctgcttgatgcacatttttagtagatacacacagaaatgaactgaggatcaccgctttcggtctttgtggcagtccaccttctctctgtcctgggactgtctgtggctcagtcattggagggagacacaaaccagggaggaaagaacaacaaacaaacattctgagaaaaacactgaaattcagaactggtccaagaacagacattccatgctatttatgttgcagcaaaagagtatagaaatatgcctgtggccctccaaactaaatctgacaaactgctgtctgggcaccagagattcccaaactgtagagtgttgttgggactacagggcacagctgggaagatgtgcctcgccccattatccctgtgtcttggctcctgtatgcaatgcctctgtgtcctctcagggataaggccctttatgctgtttctacccctctgtcttccaagacattggagacctaatgagtcactggcattttgtttccgtattgcccagtggaaactgtttgttggtgtaggtaacttgatttcagaatattttttatatggtcatgaaaatagattacaatgaaagagtagaagattcttatcagagcatttttaacagtacaccatgagaaacttaaaacatgttgcagagaataactggacttctgagttagaatgaaatattattatataatctaattcattactgccttttcatctatcttactaggttactaaaatgccaagattaaaatcacagtatttaatcacttgcattacccattatgagagcattaaacaaggtttacatgccagattattacaatttgctcgcacattgcttgggatactggaaatgtacacatatctcctgcatctctgcatgactgctccaactactggaagactgaaatatgttggttttttacataagcttattttttgtttttttaaatataacaagtagacatccttcttcatattcaagcagtggtctgatagagaacagagggtagttgttctttttaatgcatttttaaccaattaattaattattcaataaataccattttaataaatcaaaatttgtaagaaaaaatttgcttttgtcccagtgcagtggctcctgcctttaatatcagcactttgggaggctgaagcagaaggatcactcaagcctaggagttcaagatcaatctgagcaacatggggagacctcatctctagaaaaataaaaataaaaaaattagactggcatggtggcacactcctacagtcccagtcccagctactcgggaggctgaggcaggaggatcacttgagcctgggaggttgaggctgcagtgggccatgagtgcaccactgcactccagcctgggcaagagagtgagaccttgcctcaaatatatatatgtatacctatatacatatacacatatatgtatacatatatatatacacacacatatatgtatacatatatatgtatatatacatatatacacatatatgtatatatacacatatatatacacatatatgtttttcttcctttccatacactaaagaaaacaaatatctaaaatgttcaagagtaaaacagtagacactgtcataaatctgcacaatcctatacttttttttccctctatgcaaggtaagctttcagataacctctgccctagaaacaccacgtgaccctgagaggtgcagatggttatggtggttactttccatctgctcttcctcctccccaaggccacagcctgtgtggggagtctcgtctttaaggtctgaatcagctggctcgccttccctccggtttccacttaagggaagcaaggcaggagatggcaggaagggaaaacaagtcccctcctccctctctgctagctgtggctctgtggtatggcattgctcccccaaggccactgttcctggtgggcgagccctcctctgctgctccagccctcactgaatcactttttcattccaactttgactgtattaggggctttactattacttgtttgtccccttaaccctacccacacctctgtacatacccactccatcagcccccaggcccctagttgataaaatggttccatttccaatcctattttcatcatctttgtagctatgaaatatttttccatgaattcttaattggcatatgctttttacaaatttaccatttggattttaatttttaaaaactacatgtataaccacacagatgaacatttcaatgatctcttcattggatatacatttgatatcatttggctgtgtctctacccaaatctcatcttgaattcccatgtgttgttggggggaacatgtgggaggtggttgaatcatggaggcgggtctgttctcctgatgttgaatgggtctcatgagatctgatggttttatagaggggagtttccctgcacgggctctctcctcttgtctgccaccatgtgagaagtgcctttcatcttccaccatgattgtgaggcctccccagccacgtggaactgtaagtccattaaacttctttcttttgtaaattgcccagtctcgggcatgtctttatcagcagcatgaaaatggactaatataacattttattgaaaatccattccctaagaatccgctatgatttctgcacttgggagagatttcaaggagcatgatacatggttgcatggtctcttctctgaaagagcctacagtcaaatgaggcaaaaggctacactcaaaagaagtgtgtatgagtagatgtgacctaatgagtggtggcacagctaaaaagcattcacaggaggctcccaaaagcatgtgggtcatgaaaaatatggacaatgaaccagcacaaaaagtaaatatgatttgaatgaaagtggccactaaaggtgagggctagaatattgcttaacgtatgcattaatgctaaggtgatgaatattttcttacatggagaatttaaaggctaaggctgatttttttaaagacagagaagggaaaagaaatatttgttttaatgatgaaacattacttcaagagatttttgtaaataagtttattggccgggcatagtggctcgtgcctataatcccagcactttgggaggctgagtcgggtggatcacctgaggtggagagtttgagaccagtgtgaccaacatggagaaaccccgtctctactaaaaatacaaaaataaataaataaataaataaataaataaaaaattagccgggcatggtggtgtatgcctgtaatcccagctacttgcaaggctgaggctgcagaatcgcttgaacccaggaggcggaggttgtggtgagctgagatcacgccattgcactccagccagggcaataagagcgaaactccgtctcaaaaaaaaaaaaaaaaagtctcttattctgagtataaaaggacttaatattccatgaatgaaaaagacaagtggttatttaagaaaagaaatagccattcactctatccaagctaaccaatgtcaacattttaacataattacttccagcattttctcaggcattatgcacttcttacatattaaaaataaaaatcatgtattttgaattatactttatttcttagtatgataaggtttttctattatcttttaactaactctccataaacatcatttatagtgcagtgcaaattaaaaccaaaatgagttatcattaaacacccactagagtggctaaaattaagaagtctgacagtgacaagtgttgatgaggatttaggccaacaggaactctcaatatgagcgcaagctagaactacctctttggaaaacaatcaggcattgggtacttgcacaaattcttaccatatattccagcaatccttttctttggaatatatgagacaatcacgtgtgcatatgtgccacatgtactcaaagagtcatagcagcattagtcatccacttaaaaattggaaacaacctaatatctatcaacagtagaatggacaaataatgcatacaatgaaacagtaaacagctatgaaaatgaacaaactacaacataaaaaatctcacaaacataatgatggatagaagaagcccagcacccataaaaataatgaaataatttcttttgaaactactcggatggagctagaggccattattctaggtgaagtaactcaagaatggaaaaccaaataccatatgttctcacttataactgggagctgagctatgggtatgcaaaggcatacagagtggtataatgaactttagagactgaaaggcagcagggggcgaggggtcagcggaggggaataaaggataaaaaaactacatattgggtacaatgtacactactggtgtcacaggtgcactaaaatcttagacttcaccactatacacttcatccatgtaaccaaaaaccacttgtaccccaaaagctattgaaataaaaaatatgtaataaaaaagctttaaaaataaaaaatatgtgataaataaaatgggaagttcatcagaaaaaaattaaaattaactaaaaaaagaagaaaactggcacaaaagaatataatgtatgatcccatttatataaagttctttaacaggcaaaagtcaacttcagtgttaggatagtcaggataatgttgactttcaggtgggtggagagtatggaagaagggcttatgaggtgtggggatgttctatttctagaactgttaagttagaagttttcactccatgatcattcatcatcatttactgagctacatgtgtacattttgtgcaactttctctgtattattcatcaataattttttaaaaggatacatgccaaatacatcgagatttcccacagtggtttcaaccatttcaattaaattcagaaaatcaaattgatacacatttttatttctcaaaacttacaaaatattgatgctttaaaggtaacataaataataacatatctactgctataaaacaaaaatagtctagctgacacattagtctaaattcaaggtaagctatggaaggtggacatctgtgtattaactttggagggggcaggggctaccgctaagccaatcaaaggagcttcttgtgaagagagaagccaaacaaatacatgttagtcatgttcttccaacaactgaaacaatgttatacaagtatcactgtacaagagcagtgcaattgtttatagctaaaattgatttcattccttccaggaaagactgcaaagaacaatgtgccaaatttgtctctactctgtactgtaaatataactcattaataaattaaaatttcaaggtcaaagaattaaaaagaaagtccattccagccactgtaacatgcaatgcactgttattaaaaagagatcttaatgaacatactgctggttcaaataagtacttgagagctaaatgaccacatctcatagcatgggactgcgttctatcccactaacttttgtttaaagagagctcaatgtatgtttctcacattttagaattaagaacagaagagaaaaagaagtggagaaaagagcgtacctgaaccaaatggcagatgacaacttgtttttaaataacatatgttttaaatattttaattccatgaatacacattatatattaaattattattttagcagacttttttgtcctccaaatggagtccaaatagttcacgcaaaggtatccttgtttctgcaatgtctaataaatgaaagacattttcttatcttcttcccctgattactagagttggtaagaaggataaaaccagtaactattatataaaatgttttattatataatgtatgtattatataaatataaagtggaattaataagtataaatgaatataatattcatttataattcttaattacaaattataaattaattaatataataaaaataaatataattcattattagaagaactaatatgctatgtccatctttacaatgtccacagaagtaccaccttgatgaggaaacagctgtcgctgtcaaaagagacattcatatgtccagttgcaattcttttcctaccacctaggtgccatgttgaatgggcgatggagagctgctctcattggttggattctgtgacatctgatggggctctgttttctagacagtttcctaactgatctgcattaagaaagcacacagatgctgtcctttcctctcctcttcccctaagataacaagtggttacctttgatcagccaagctttttcccttgggtagtcccttttcctccagtggagcaggccacggcagaggccaatccagccaggcccagaggatcaaaggagtctttccttctgtctcactctcctgctccctatacctggaagtgtgcattcagtaagctgttctatacaccagttgcaaggtcttgggcttaggtttgcctgttgggtgaactagatccttaaaagcctgctttgctctccagctacttaagcccagacagagaagcggcagcactgtaccatttcctttttaacagggaagtatacagaaagcatgtagcctggtgactgtcacatggtaaattctcagtaaatgttggcccctacaaccaacaccttcattcctgctgctgctgccattcctagagctctgggttggttaaggccaaagtcacctggcttccgttgccttgttgagtactgatttccctcaaggacctgatagggagtgagctgtttgtggccgggtgagttcagctatgatgtcacttcggcattacttaggcgcacccatctcatgttttctcctaacagatagattaagcgatttgatttaccttagttaagatgatggattttttttcttcaaagtaaattcaagagcataataattctgtagttttagttcagcaacttcattgccatgaagaaaaaaaataaaaacttttgtctttagagatagagaaaacaaaaattttttaatcagtttgatttctgtgactttcctctctattttccattaattctaccaatcctattttctgtaatttgatgaattaccaattccatctcaaaaacaatactcaaataggcaaaataatatcctttccaaaagaaaatacaaggcaaaatagaaaaatattgacacccaatagtgtagaaagaatggctcctcaaacaactaagtccctctatgatgaactaactgtgcctagaaaactcctgggataagtgacatttgtttgtataggtgttacattttccaacaatgcagaaacttatccatcatgatttcctttagcagaaacttttgagtctgagccataatacacatcaagtgtaagggaaaatgactctaacatacatacaagagactcagttagatctgtttacaaacaaaccagctcatgtttgtatcatttacatggaaatctcaacaattcaaggtaaacagctactttaaaagtctcagcagcactaaggcagaatctgttattcaagcaagaactttcccctcagaggacttcaggtactaggtggatataattaattgaaaacaggaagttgggttccaactatttaatccttgcttaatcttgggtctggtggcaggtgttatagaggatatttataacaaagacaggaagcacctagaattctgagccaagaagacagtaaggctacctcaagaatcagaatgaatcttttatcaacagtagtctcatcttctagctagtataaagactttttccatattagtatcatcatcatcctcatcataattattattactgttaactactaactagtctgttttttgagttatcccttgaaccttgacatctcactcctacttcccctgattcttttaatcacctttattttaagttatatagagatgtccaacaaggaactatcattagtgattcaataactctcctccagaataaaatcttcaaggtttgctagggccattggtcccataaaggtgaaaaaagtgagcccttttgaagtggcaggctctttagatgtaactggaagtagagcttgtaggactactatatgagactaaggctttatgtcctaagcatacttctcaatatttcagaactttatccccttggagggtgttaacttttcaaaattaaattacatatggaaaaggagtatatgtagtgtactgtagagtgtatgtagtgatggggaacaatttgtctatattattcaacagaaaagcagcatcaacttctacataaggggatacttttcttaggggtcttgttatcatggccttcgggaactttgctcaagacgtagagaacagcatcatggaggactgaaaatgagtctggctacttaacaaggagctacaaagtctccttctgcagttccttcttcagagagaaagcaagtcttccagtaccataaaggaggagagattcatctgattggaaatgtctatgatgtgcaagaattacttgttcatattacccttggaaaacctgtgcacaggaccatggtcttatcaaaaacagctttttgagcctcactgtttcatctgtcaaatgagaagctttggagtagatgatctccattctactcacaaggtttaaggccccatttgttcctaaaatccagtgctttctatgattcaaaccatattcccctgtctgtcattgcttagctttgaccatgttataaagtctgttgcttgaatacacttttgtttaaaatttagtgacccatcacttgagtatcctacaaatgagaactcttttctttttcctttctcgagaatagcatcacaatcattgcagcaacttatgtcctctctgggccactgtggtcttcaactttgatactactcccaggagaaacgatagggtctggctttatgctaactggatttggatggtgattgattagaagaaagtgggaccacgtagccttgcaaaaggttcagtactgagccacaagcttcaacactaaaggagcttttaccagtgagttcacagctatttttatattaacaacatttctcccatccaggtttgtgcattttatctttattctttcaaatcctgaaattgcttggataagagagaaggtttatatattatacacacacacagacacacacacacacacacacacatttctaagagcagcctgaacttttaggagaaattgaagaggctttgtgtcaagtacagctaaatccagcctttccatatcaaacctctgctagaaaattactgtgcagatgataaggcagaaagatataataaaaagtgactctcctcaatttacactgcaatattggtatgactgaatatttttcattcaggtgcctgataaaatcgctaaactgtattgcagataaataaaggaggcttctgtcaagaataaacaccattaatcatgaagtcttaccctctcagagcctgtgctatgcatctgcacaaatacaccagcataaccatcacacaacacatgcttgcctcctttataaactgttccaagctgaagaagtgctcgtttttcattttgcaaggtttaggcagctatagcattttgaaaacattctctttacatttttaactttacattcttgcaactaggtccattattgtaacatttaggaaaatgtggctgggctctcaggggaaaaaatcttgacaatgaatcaattttttgaccaaatacatacgtacacacacaaatacatatgacatactacatatcctcaactctaagatgttactgatctaaaggtgcaaaattgtgttagataccactaaaaaaagataatggttccctatcacttttggtttttactttacttattaaaagagctcttttagaattattcagacatagattttttaaacatgtatcattccagcacatgtacaaaaaagggaaatataagcaaaattattttattaaaagatacctggaacttcctcatgactgccacttcaccaataagcaattgtaaaacactatagattgtaaaatacatcccaacttcagagatgttaaaagatggaaaaagggatgtactacttagaatagatgatttaaatatggggatagatatgtagtaggcaatcctgccattcgtcaaatacctatgctgtgacagacactgtgttaagtgctatatatatgctcctttgctgaatccttgatataaaatggtattgaatggtgaaactggcttagacagattcagtaatctgacagtaagtatctgagctgaattcaaacccagtctatgcttcaaagtctatgtttttaaacccaaagaaaaactgccccaaaccagatacacatgtgcatgtatgcctacacttacatttttaacattattgaggcttttaatagaaaaggatggtatggttatctagctaccttaacttccaaagggaatctatttaaattgatgttcaaattgtagtgccatggcaggtcacactggtggctgcagtatacacaaagtgtcacttgcagagtataaagagtaatgagggaagtatgaccaccattcaggcaagacttttcagcagagcttcacataaggaaagtgcaggcaacaaactttatggcttagggagaaaaatggcatgtgggcatgcatgtgtcagggccacaatattttcatggaatccccttgtaagtgtccacactctaggaaaaaacaacgaacaaatttaaatttttccataatcatgaaatgttaagaactagaaaggatcttaaagatcatttaattaatttattttgtacatgaaaacaaggcctgcagagatgacggaaagtgctcaaggatccggttaacttgtggtagagttgagaatggaacctcactgaggtccacatgtattatgaaaacagatgattaacttgttttacgaagatgatcatgagaagccatgtgccaacagcactatgtttgagtttgctggaattacactttgaaacccaaccaaatagcattgtcatgggtgaatgtaaccaacatattattgggtggggaagggatgtgctcaaaggaactattcagcaaagccataatccagtcacactcatgagggatgtttagctgtgttacgcaggaagtattatggaagctgcaattcagctcactgggggttctgtttgcagagcccactccaagcaggaagtgccttttctagccaaaagaggtttaactcccatcttcctgataaatcctccctctgtgaagaagcagcttgatcctgtacagtgaagtgtttatttgctaaatggaacacaggcagagagcctcacaataacgtctgtgctccaatgatgcacagccatattgggggctcacagaggtcagaccccaagaagcctcgttcaagccaggcccagcaagaaaagaagaggataccaatgaaaccaggccctgaccccactgcttggtacttccccagttctttaaggaagagcttctgtgttaaaaataagtatttatactgtatcattttcatcacagactgtgtgttcaatcattcctgacaaactttttggtcctcttttttattatttttattttataaaaattatattttatttataatttattaaaattattattttaatattaattaaatattattatttaatacttttaaattattattaaaactgctcccaggtacattatcaataaatgcagacccctggttagctacaatgcaccccacctgcttgttaagagtagaaattctcatgcacaaaaaagcaagtaaaaacaactgaatgtacccttcataagaattttgcttttaagacagctgaattttgtcaagctatatcacaatgttttaccactatctacattgagggtataatgcattaaagaataaaatatttactctttgttaatagagttaaaaacatagttcataagtttatcagctgttcatttctgtcccagtcataaaccatgcttcaaaaaatagcatatgtacaagaaaatgtagtggttatagtaagatactcgaataattttgtttttgttgttcattatttctatacataaggcaatccattttatgcaaattatgatgaaattctttagatatgtaaatttaactcaaatggagctagtgggctcccctctcaccctacacgggatgatttatgttactaacttgggcttgagtgtaacacctgaactaccctccttcaatagccttattcacactgaaagaaaaccaaatgacttagtagcctctttcactgattttaaggctagtaatgattcgagtagccatgttattaaactagaatgaagcactactctcctcactaatgaggttaaaaaatgtctttaggtctccacgttaggggcacttagcaagcactctgcttggcagagacccacagcggatcgaagccatggactaatcacacaggccggaatcaaatggactggaagaattaggagacttgtggctcggaggaatgtaattcatgcagaaaagcgttgtcagagcaaggccagggaacctcatgggaagaaagcaaaataaacagttcaacaaagaaaacaaagaagggccaataggcttttctaaagcttgagtacactgagacttcagtgggtgcctaggacaaagacctcatcaaaggacacccttgcaaagcaaacagaccaaggaaggatgtttctctccaatacactcgggggaagggggtggactctacttttcactccttccaattcaacttccacaactcccaacttccaactcaactccctcctccaacaaacacagaaaccaccaccaataataacctaagtaactaaaaagtccagtctgtctgggttaaaagatggggaaaggtggggaggttaacacaaattaaatatggtgcagtgcatctctggatcgcacttcagatcacgaaaaggcctttggaagtgtacccacctcctgggtcagatccccacagcctgctccccacattccagaggatgaagagagactccagaagtgttcaaggatttaaactttgaaaattctctctcacaaacagtatacaacatccacaaccgtgcagctattcaattgcgagaatggagcctagcatggctttctgaagaaggctgcacctctgctcacagctccagcctcactcttctatttccagtggactcttgacttggactattcttccctcaatccaatgactacgtgtatcactgcagccctgaaatgactttggtcattaaaacaagattaaaatacttgaggctgaccttcttttccccctcttgactacttcctttaagatggaagaccatgctgtctttggctgactaatcccaaggacaggcttagagtgctacaaggaacacagacagaagtgagtgctgtacgggtacatacgcatatacagtaacatagtgaagatatataaaaaaacataaaatacttactttaaataaatcaatacaacatggcaggtaataaaagtattaacataatccaacataactctaatattaatttgttatatccctggcaaataacatatgaaaaatcagaggccccttcagaggtctgattgcttacgttatggacttacaattctaaatttgttcctgaaaactttccttagtgtgcatagtatatgttaacgacaatgggtgctaggaatatggggattttgctctgtgggggaaccagagattactttgaacagaggcaagaagcattttagtaaactggaaatgtttatttccatgctgtcttaaaaatgtaaagcatattcaagcaacatggtttggtgatttgttttgcaaatgaggcaattcatttaactctagagcttccctctccccactccccatcagatgatagagatactattcacttatggtgaacttggcaatatttggatactatttgaatgtatttagaagaatattggcagttttcctgtttcatgtgtaacttgttcccaggttttgaaagacatattaaccttgtcaggcctgagggaatcatttactgtgcccagttaacctaactcccttaggctggctacctaggccatactagacttggccatggtatgcacagggctccttaggaacaatttacaggtgcttccaggcaatgagggaccctgtatgggggaaccttaaaaaaaaagccttaaagagaatgtcttcaagggcaactgtacacacaattcattttggtattagttcagattttcagtctggggccaggcttccattccctgtaagagtcccaactgagaactttttcttttagtgaatctgtaacctccctgtattgcataagaaaattttaaatatctgtcacttataaacatgtgtgatgctgcacatgccaaaatattaggtgatgggatttttaaaaacctatggctttgggttagacactcacttttatctttattggaaatgcactcacatgctctaaggcagttcctgccactctgaccattctccctgcattattttcttcctgcacacgtgtgtagacacacacaagagaaaagaggcagagtatatttctagcatcgcacttgatgtttttcaacacagagttataaaaattgaggcaatgtcaccaaattagctaagtcagcacaggaggtaaacacaggccagtaagccgtttaacttgttaatttttactgaactgcaacacaatcatgcccatttctgctctggtctgccttttgcaaagtccacatcaaaactaaaaatggccaagattgtatttttcaaatttgtttcagtatagctctctgccaaaacatccctagttttctcagagctccaaggatgagtttcaaaatccacctctctcctcctatttccttttagtgtgcttagcttgcttgggtcactgaagatccaaaatctggctaatctgttacttcatactcaaaaagttagcaagcaggttcctggaaacatatctgctaacatttattttctgatgtgtgattttccccggggcagggatggggatgcaacaataacaacaatgagtgacaggcagccctgtgtcattggcctttgttcccccgaggaaaggtctgaaatgaactcagcttgcagtgtggctataggaaatggcatgtctttgtttaggtgaaaaaagtggggctctgttacctaagtgagggagagacggccacataggaaaggctgcagggagcttcagtttaggcagtattcaccatataaacctaacctcaaagtgtcttcccatcaggacaaattctgttaaagttcagttttctcaaacacatacttaaaaaaataaataaaatgacaacagtaaatttctgttttctttgaagccaggcttaacatgagtggaagcattgtactcaaagaaaaaagtctgttacagcccagtacctcccaggcccccgcaacaggtttgacagcagcctctatagagtcggcggcttccggttcagtgaacgtgaatacctcagtcaatatctgctcctggaccgtgctgctgagcgcagcacaaagaacacaggaattttatccaagaagctggggctcagactctgaatatacactataattagggcctgctttctctgcaactgaggaccgaattcagtatttcagtcattagaaatactgcaaaacagaaaggagtatacaccctttgagtacaatttatctgttttgtggttgtttcttaacgcaaagtaaagtgtgtatcggcggatctggatttatgtgcccgctcatcagaattttaaaagtttaggaattgaaactcaaccatcttttcctaactatgaggaaactatgtatgtaggtggcctaagatagttcttgaaaattaggcaggacttaaactttttcagttaatcacgagaaatgataaccaaataataagacatttattttttgatttgacatgatatgcagtgaaaaatgtgaacaatagcagtagaaaagcataaaagtagaaaacatgacacatggcattgctcataaaaaagagaaaaataaagcagagaaagaagtacagagtgaagatggagagggggtgttattttagaccaaggttggcaaacttttatctttcaggcattccaggtcatattctctgtcacagttactcaactctgcccttgtattgctaaagctgccacagataatactaaataaggaatgtcactgtgttccaataaaactttattgacaaaaacaggccatgaaccgtatttggcccataggccacagtttgccaatccctgttttaagtagttgttcacagaagacctctctgagaagcagaaactgagcagggaaatgtgtgaagggagggagcaagccataggtatctgaaggaagaaggctctacgcagatacacattgtgttctaacatggcttcccttctattgggtttaccgctataatcactaattattatctacccatgttctaacagagtcttctcaaatgtgattaagtattggtcaacactccacccagttgatgaatcacaatttaccaaaccactccagtggctgaatatgtaaactgttctattgtatagtgtcatacattctacagcagcaaagactgataagcatctcatttttgggttactcaataggtacattaggtcaaaaggcctgaacgtggctttttatggctcttcgcacactgctgtatttccaccttgggaatttgcagaagacaatgacagccagtaacactgaaaacttcctatcaggtactgttagaaatagttgtgctcatccaggaagtagaaactagagcagccaagtctgtggtcttcattttcactagcaaggcatggaagtccggagcaagggtgtggagtctgatgcctgggttaactcaagggcactacctacttgtaagctgagtaacttctctatgtcaaggtttccatgtctttaaaatgagactaataactccagcatagagttgttataaatattaacacacataaatattatgactacataaagtctttaatattgtgcttagcctatagtaagtattcaaaaatgtcagctatggtcatgattatatactttttcatctgaattatctattcatctcttttttgcccttatctttgatattgctatggtcttcttaaattgttcatttaagatggctaatttcattcattttatttccatgtgtcggctctggaaagcagcaatacattaaatagcactcagtcatataaggggaccagtaactgctttaatatcaggaaattagtttgacagtggagagcatctgatgtggcaatagctactattaatagaatctattctatcaaaagtagtcactgagcttttattttttgaatcctagcttgttggcacgaggtgacacactcaaacagaaacaaaagaaaaatgatggtcatagcagtgaccctattatttttatcatcattaaaaataatatttatttaggagctaccatatgtagagcatgggctcagcctagcaaatgcaaagaaatacacagatcgtcttcaccctgagagatgtaattataatttagttcatgttttctttttcttttttgggggggcggtggggagtgttttagggtttgctacagtatttgctagactttgcaatttgatatgtcattacactttaccagtcttaataatgttatggtaaagcacaaacactgggtggaggaggcggggggaaactttcctttgttaattttaagttacactattaaaatattccaaactagttttgaccccaaatataattataaggttttactaaatctccatattttaccggaaacttccctaagaatgcaacgaatgaaatcactattacatgaacaggcccaatatagtgttttcagtaagcagctagactgaagaggctcctttggaataagtatgtgagctctcagtaaagataataccaggacaagcaacgtgctaaatttaggggaggggaactcagtagtagccctggtcatctacttactatttccttctctaagcttttaccataatgatataccttttcttagagctttttctctctgggaagaaatgtatttattcatatgccaaacttgcctctcatctccctgctctcatccctaacaggcagccataattacgggggcgaggccttacctatttccagtgcactctgtctcacagctgatattaatgatcttcataatactgagtcctctccctgaggtgaagggaggtggccacttttagtgggaagaacagctctccttacttaggtggaatgattccagagagtgtcaggcagccttggaaggagacacattgactcaacaaagaaaaaaaaagggctgacgtacagaacagaacatgagtgctcattttccctaagacagaaaagctggttttcgaaagtggattagtaaagtggatggtgaaatgcaacagcctttatgtgagctggcttggggtgcagtactgttcacatccacagcacaaagcaagagcagctcacagctcgactggcaagaagattggtggggcttaattattgcaatggattagtaaccaaggaccctgctttggaaaatgaattgcagatctcagtatgaaacagaaagacagttcgaaattcaattaatactggtccataaattagaaaaccttggctcagaaagattgtacataagggctacatttctttttcccaagaaaaatccaaaatgaatgaaatcaaattggaatttaaagctactttataatttgggtttctacaaatacaccatgcctacttttaaaaaggaagcatgcttaattgagttctaacactaaaaaacaaaaaacacacactcaaaatgcaagagagaaagtactttaattattactgtggaaagtagccacttgacaatgcaattgtattctggggtagtaggctgtaatataccaattgcctacattcccaagtgaaattttaaaaattagtacttatttttagcctagcaggcatcatttgttcccatagaatacagtagtgtctcctcgagttagggaaggaacagccctgatgtcaacaatgcaaggcaggaaatacagagaccaagaagtaaaaatatacacataaaataagagtatgtgtgtatagattcaggttctttcattaatgcacaaaataatctcagtaataaagtagactcactctgatattttttctaaaacattatacttcttgcaatctagcttaacaagtctctcaaaggatttgagagagagggagagagagcaacattccatttgtttattgggcctaagacctggtgaattcagtggagaataactttccgaggaaacgggaagattcctcatatccagtgtttcttaattttcaaattacttgaattaaacaaatacaatgcaggaattgtacattttataacaacctttacgtgacaactcagagaataatactacttatattccaggtcctacttagaagttctgagtctaaattcacaattttgatttaagaaacaaaatgccaataaattataaattatttctagtgatgtatttgaatccattcaagtttctatactcattctacactgcctaaccataaactgtggataacaccgtaagaataagcagggcaagctgaaggcattccgtttagcaaactgggttctttaacacaaactgacgtatttccgtacatatttataaggcttagtggttattattagtctgtaattgcagttgttctaacacctaataagccatggttggaaaaacaaaggcaggttaatttgtgatttcctctactcattcagaggcaaattaagtgtcaaacagctaatacgaaacatatttcattttatgagattttaatttaattctgcaccatatcgttgatgccttaatatagggtggtttatctaaaaagaggagcaatttataaacctctttcaatagaatctttaatgataggatatgatagcataattatagaagcgcctgcccttcttctaaacagagatctgtcggcatttccatcaacacaaatccttgtttttaggagactcgtaatttagtttttaaagctggcaccagaagaacaattgtgtgtacaaaataatgataatatctccaaattttgtcttcttagaattaaaaatattgcaaaaacttagtactcttcacttgatctcattttctataagacaattatatagcaaacagtttggaattcaagttttggatgaagtgattttactttcccaggtaactgattcatcccttagcaaatacgtgcttttaagatttctataaccaagccacatttgcctcgattagcctccactttcaaggtgatcacaggtgtctacttatcatacctcagaaggtgcaagagcaacccagggtctcataactgagcaagggcagaatagaaactcccagtatttttcatgccccccactgcctggaatgccaaccttcagcatttatttagagctctgtgcttttcagagtgcttacatgaacattatttcattgaactctccctgtgatctgaagaggtgggtacagcagacagcttcatttccacgttacgaaaccaacacatgcaaaggtcagtggccagagtgcacagcacaagtgagtggcaacacaagaacaggaattcgagctctctgactgctcctccactgtctctcagactgggccaatgtgagtgtccactgagcaccttttacaaagtgcctgaccaagtgctgggcactgcccctgaaactagaagggagcagtgaccgttaacaataaatcaccaagcaagaggaaaagcatcacaacaaagctacatgcgagtctctgggacggcccttaaattaggccttgaggatgaatataagcaggagttcaccatgcagagagggaaggccactgagaccaatgcagacagaatgtcagtcacaaagacacaggggcgtgacatgccccagcttgctggggcccacttcataagcatagcgtccacccagggccctgccaggatgcactaaaaccaggcagtcccaggaggccacaaacccataagctcaccattctctgtgcccgcagcaatgatattccctctcagaatcttccaggacttgtcttttgaggctcaggattatctatcagctttacatcatcaatctttttgataattatacatttaggctgctagagaaccatttagtcagatgctagtaaagtatccaaagcctggctaaaaaagcaggaagaactaaaatccaaagaaaacccagctcaacagtcacacctgaaatgtgactcccccgactctgcctacgaggatggtccagatgtgacgcatcttgtctcgtgatgttatcaccacgggccaatgcaggtcagtaatgagggcctagaacacacagtgggggctacaggagggcttgctgttatattccgccatagaaccaagacttggggtttttattgataaattcatatttgaatttaattacaaggcaaactataatgaatgcagaggaaatagttcagcctattatataaactcattttaaaaaattgctctagaacatcatttctgaaagaatgaagaactccaaaattccggagaaaatctgacttaaattaagtacatcacaaaggctccagtctgggaggaattagccatccatgtctccgaggtctatctggcccttgcatgctctgaaccatggggcagatcctcatctgagacccatgtggtcacatctgtatcataaaacctctgtataatggggtgaattacatgtcatgtttcaggctgaactaggaatttccttccctttgtatagagaattttaaattggcctcctggttttattagagggtatttttagcaggcttcagaaccctgtaaatacttacttgtgttccagtgaaaactcaaaggatcagtcacaagtttctgcattctctctctataaatacccacttctcctttaatgcttatagaagtctgcaacacagatttattacttacctccaggcaaatctgctctgaaattacaattcagtaatgggagatggatccaaaaaactgttggtaaaatattatatgtgtacttgggcatgtagttaggattgttaatatcaattaattctgttcacagaggaggacttgttttaaaacaacttcatttttctttggcataatatgtaattacacagctgtaactaatagccacggagatgcaatctaccatctgaataaccagcattattcttcaaagtattatttgtgcttttctaactttactgtctcagaataaagggtgattattagatatgaataaatgtatatatcaaggccgttagcaagggacagcccatcccagagagtggctccaattattatggtacatgacagtttcctggacagtactacaaaaaaatactgttttactttgcaactccaccatcctttatttcctccaaaccaaggaagatggtatttacttccaagagatttcctttttccttttctaatgtatgttatcactagcattctttccttttatctttctgtaaaccatgtgctcgatcacatttgccattttgtttggctgacattcccatcaatcaagtgacttctggtgtacttacataggggctatgaaaatttaccataaaaatttcattacaattccttgtgatccccagaacaggactttcatgttacagaaatttgaacataacaaacttcaaacctaatgtcgaccaaatacatattctgagtggtaactttccattaggcttttactttttaatttagtatttacagcccacagaacacacgtcagcaaaatatataggaaatacttgtcggcgacctagtgtgacaggcattcctcaggaagcagcagggatttgcttcagtgaacccacgaacagataggcttgctatatttcaaaagtaaatcttacacttctatcacatcttcaaagcccagtggacatgccattaacaaaaagtcctgagatggtaaaagccagcatctcgttccatttcattaatgaagaaagtgttaatacttacatatgcaatggaggaatcggagatggatcgtaatggtaacggccctcatgatgtctggcatcaattggtacaggaggatggaaggcagggaaaagatgaggagggtctgaaaagaagagagagcccaatctatatcaaatgaacactttcaaacagcattccgattcacaaagcaacattgctatactattgtatcttcactacctacacttaatctaagaatttgtaaaagaactctttaaggttagttatgaagctctgtgaggtactgcagcagtgtgactaagtaagtagtgcctgcacctacctgagaaggcagagcctgggactgactgcaactcaaacccagacacgaaagcaagaaagagaggagcaacacaggctccctatcttgaaagacaggctgaccagaggagaagggctgaagggagccacaaagccaaggggaagagattaaaacacacttatttgaaaaataaaactacattgtcaagttaagttttagacaaagacactgtaatacaaataccagtttcatttctcccatgctcaccatacttttaagagtgaaaggcttgctagaatctgtggctgatatacacatgcatgcatgtgcttcttttttttttttttaacttaaatacatattcccctccttcttggccgggctaggcctccatagtccccacacaaaggcagcaaatctatgccctgtccagggaaacactgtgcagccctccaggaagagataagctgacccactcagactcacagacatctagagccaaactcagggaattcctcccaaggtagtgttaacattcaccttggacccaggccctctcctgcttccacctttccccagtccaacgctccgggttcctgagctgctgggtgtgtgctcttccttaaaaatagctctcccacccccacttactcctagtaactcacacccattgtcactgaaaataaacctttattaaaaaaaaaaaagtgattcactgtaaaaactgaagagagttttaacagattttatacttagaagcatgactgatgagtcaaggttttcccaagtttcaagaagcaaaatgaaggggtccaaaacttggaggtttgactccatgtctatgagactaaatacgacagcaaaatgtgccaggacatgttcttcaaatgtgacgggtccacactggtcatgctgggagcctgcctagagccaacactgctgaggattggtgtgtacacccacaagcctcagaatggcttccagttatttcaccctagtgctgagggtagcagtctctaaaggcaattccaatggggccttctctcagcggacaggttctgatcgaccacctaagaatgcacagagcgtccccccgctgaagtcggctgcatcccccgaggtcggcaacaccgccatcccaactgggtggaaatggatgattattagatgtgtgtaatgttgaattcaggtggttttgattttcttccctacccatttctctattttccaaattttcttcaacaagcaactagtagaatataagcacaacaaacatgtttttaaagttatagtacattgcttcccttgttttgattttgtccctgctgccttcaagaatataagactctgtttatgaagaaaaaaatccagtaagagtaaaaaaaacgatgagcatagcattcatagaagctctgtggtctaccagggaaggacccgaggctgtaattctacagtttaccaccagatctagaatctagaaaacttcccagaggactattttactgaaatgtcaatgactcaccgtactttgtgactgtcataagattgagtagggagggagtggggggcatggaaagaggaaggaatcagtttgatcttgtatcactgtcactgtagtatcgtgatatacaacaatgctgaaaattcaacaggtgagggatatactaatgacctgatcatttatcacagtttttttttttttttttttttgagacggagtctcactcagtcacccagactggagtgcagtggctcgatctcggctcactgtgagctccacctcccgggttcacgccattctcctgcctcagcctcccaagtagctgggactacaggcgcccgccaccacgcctggctaattttttgtatttttagtagacacaggctttcaccgtgttagccaggatggtcttgatctcctgacctcgtgatctgcccgcctcggcctcccaaagtgctgggattacaggcgtcagccaccgcgcccggcctcatttatcacactttacacattttgtaaagtccatataaaaattgattatattttaagtttaccacttagtacttaatatgaaagggtgtaggtattattatttgtaatgtaaatattgaaagttgatttggtaagtttgaaagtttaagttgaatgtttattcagcaatgttggcaccttcattgctgcacatagttcagccatcttgacagttaaaagccaccctctgtagagccaaacattctctctcatttaaccattttcaaaggaaattatgcacccttcttaaaacaacaaaaaattaagtggggtcatcttttgcactcgtttgaaagcctgacatatactagtttatgtttactgattttaaactttaaaacaaacccaaatcaatcagattcaaatccgggtgagggtggatggccatgaaatatgggggtggctcttctttctcttccacacctttcagctatcactgccaatgcaaacacgcatgccccctgcagacttcttacttaacacacatcatctgctcttggcaatcacagaaataaacttactagaacagggtgtgaattcagcattcataaagtcgtacccatctcctcagggcatcgcacatgcaccagtttatgcggctgttttgagggatactgacaactatgtcagagttggaaggtattttcacttctttatttcatggcttttggctgtgttctgcatgatgaaattctctccaccaggtaagtgggtgtcaactgtatctggttttctctatgtgggtgcaactatgaattatgacaaagtacaaaaccacgtttttcactcaaaatgtgtgaatttattccacatttaatatatgcctcatatatccccgaagtaacagtcacaatcttttatatgagtgtttataatgaagttgcagtgattacgtgtatggagtgaagaccaaccagttaatcccataaaatcaaaagcgtgtacccaacaagtataaaattatcttcctcaaggaaaacctacaatgctatcaaggacatttaaaagacactgccatcttctcattttcaagaaattattctttcagggtttaaattttctctctctcaccctctctccctctttcagaataaaggataaaatgacctagcactgcaacaataaatttgagaggaaaatataaaacacaattactgggacactaagtagtcatttctcactgttgagtccacagtattctatgaatttaaaagttaattctgactgaaaatatgtgatgcatctcctaacactgcaccaaattcttaatgcttatttatgtcccaagaaaatttatgaattctgcattcgagaattatgtttaaataaagaacagaaaattaatggatatgatctgatttgaccaaagacatctgattttggtttaagtgtctcactgtttctacgtttcccctcttgattaaatttaaaataacttctcctggattgcagaagtctgtgtggacaattataccttgtgttggttattagtagaaatcacacctcttaagccactttctgggaaaatacaatggaactcccctcttccaattcaagacgtgcttgactatagcttaacaggataaatgaagaatgaaaagcagtatgggcatgtcctgtaacatacgtggcatctcatggcattaatcctaacacatttcttgaaaaatgctcctgaatcctcaaacgttgagtacttgccttgctggtgtcttggtttgtcgtttctatgtggctcagcggcatattccatcatcggcccaaaaagctgtccaagaaaacccacatgacgagaacaggcccttgtcgccagagccgccataattacccagctcgcagtttattatttacacatgagcagtgcagctgtgacgcatcataactcaagcgtatatgtaataagttactgcaccgcagccatctcctgccctgccccttgacaaaacaccacatgatgacttctccaaagtcaggcgaaaactgctgaagcagaaggaagtgccacgaaacctggctacctcctatttatcatacaatttcctgactgatggctccacaaaccagctgctaagtgctgtgtactctactgtcagcaaactaacgggctaaatggaagacagggagaataatgtgcagaactggtggaatcaattttactgagggaattaaaattctaccaggtgggggcgggtctgtggagcagtggtaagcagtcaactgtacatgcttatggttgcaaagatgatttattacagacctgcgagaggtttgactattgtacccgagtcctcttacactaaacagagatttgaagagtgtgcactctcccaggcttgagtggaatggtctttaaaccctataaatatgtaactggcttgacacatgtttaaactgaaatgcatagcaaaaatatttgtgctgggtagagttgtcagtattccatttcacactggctgtcatcacgttgagcattaagggtctcattaggaacgagaggcattgatttttaggtctcttcacaacagcctgggttgatcataaaacctgtagccagagaataaccgagaaagacacttggagatttatctctagttgcatccttctcccaagaaatagttatagtatcctcaggctataagatctcttggatgccatcctgggaaactgtcttttaaggtttgaaatttacatacaaaaattgcagattaaaaaagagagatcaaagtctctcagttagtgccctgaaggagtaattcaccaaatgatacttgaatggtctgaaagtgcccgggaaacagtgcaagagtaaactgctaagtgcagaagtcctcatgggtgatttaaatactgaagtcgtctgtaccctggccttggaatttactcaatcagcttggaatcatctcaatcagctagggatgattttctgtcattagagttagtccagcctgtaggaatggccagtcccctcaaactcattcaatcatctgccatcagcagaaatatcattaaacagcatccgctatgctacaaccaaaatcaccatccagcttctataaaatgaaaggtctcaagcaggagagggagagaagaggagagacagaatgagagatccgactgccaaggaactcactctagtgagatagtagagaggcagcccaggcctcatcactgtctcttcccaccatggagcttctccagtcatcatcctcgtgcctgcaagtcgtttttccagggctcagtgcactgtgggaggccatttggactgactccaagatgcagactgacttactaactcagacaaccttgcaattcctgcctatggatgacacggcaccagaaatgagctgatccgccctctgaggacaccccaggtaacctgacaaggagagtctagagcaacgtgttttgagcaagacagtctgtggcccaccatgatctaccgtgagcggaatctaagaagtgctacccccacagggccccgctgaggacttgctgggcagaatccccacagcatcacctcatggagcactaggaatcttttttctggtctcacaagcatattatgtggggttagaaactcctccggaatcatcagaatgagacatcgtatttatatgatcttctatagggtaatgcaagtttaaagaagctgtggttctagcatactctagaaatcctgtaaaaatgccctgaaactttttttttaaattatctattattttgtcactttacacaatggcaggagccttaacttgaagagtatatgctataggaggaaactgcaaactatcacatgtgggccggtttttgtaaataaagttatgttttaattttttaattttttataggtacatagtagatgtacatatttatgggtcacatgagatattttgacacaggcatgcaacacataacaagcatatcagggcaaatggggtatccatcacctcaagcatttattatgcgtgctataaacaatccaattatactctcttcattattttaaaatgtacaattacattgcttttgactatagtcaccatgctgtgctaacaaacattgggtctcattcaatctttctatttttttgtacccattaaccattcccactccctgctcaacccccactatccttcctagcctctggtaaccatccatctattctctatccctctgagttcaatcattttaatgtttaggtcccacaaataagtgagatcaagttctttctgcacctggcttatttcacttaacatcatgacctacagttccatccatgttgttgcaaatgacaggatttcattcttctttacatctgaatagtactccactgtgtatatgtaccacattttctttacccattcatctgttgatggacacttaggttgctttgtaaataaagttttattggaatactgccatacttatttgtttacatattgcctatggctgctttcccacgccaacaacagagctgaccagctgagacaggaaacccatggcctaacacatttgttatcttatcctttatggaaaaaggttgacaaaccctattccagtgtaccatgataaagtaatttgcagaaattattacatttcagaaaaaaaaatatcaattttttatttattgtgttgtctaagcgataacactaagtacatcaagtattttcaatgcactttcttcatatgctaacttgtgtgactgacttaatatagtaaaagtgttcatattaatcattaatcaatagacatctcatctaattttagcaaaacccgtaacaagtagacaaatttcaagataatggatgaaattaaccataaatctagcaataatagcagtagctaagcatttgaaaattgaagttaccttataaattaagtaaaacaaatacaaatttacataaaatgctaattaacaataaaaagtaagctatttctaaaacccaataagcttttacttctggcaactacctgacagtcttgactcctggtctataaacttccacggacattctccactactcaaataacaagctttttatcatttcttttgtgtaagcatgcagactattaaattaattagtattttagacctaaatgctacccatcactacactctggccacacccacaattcatccttttttttaaacagtcagatagatcccttctgtgctcctcaacaaacatggtcatgtgtttcccacaagaaaatgccaaatgttcctctgcaagtgaactgacaaaagaaacctctgcctttactgcttcaggtatgtcctcagtcgtgaaccaacaactgatctcgcccctttctggaaacttctaacttcttctgtccgtaagtctgcatgtttctcccttcaagatcacatccagtggatgcccagtggtggaaagaaaaccacatctacgtactggctgaccagccatatccttccaaacagagactctggaatgtgtcttgcctgtgattccacatatatgcatccaacatttttgttgttttcagctttcctgccaggataagagagaagaaataaccagagggaaaggcagcaaagagaaataaggaaaggtttacatccattctagctgaactgcagaactctctcagggaaatcacatgtaaacatataaggaatcacttaaaagtgacaaatctgtttactttgaaatatgctaatggtgtattttcagtgacaataaataagcttggaaattaaaaatggaaattagttaccagtgacaaatttttaaatcaatgactgtatttttgtatcacaaaattcaaaagtcacagttatagctctaaaaatatgcatttggattctttttttttttttttttttttttttttttagattgagtctcactctattgcccaggctggactgcagtggcacaatctcagctcactgcaacctccacctcccgggttcaagcgattctcgtgcctcagcctcccgagtagctgggattacaggtgcccaccaccacgcccggctaatttttgtatttttagtagagacaaggattcaccatgtgagccaggctggtctcgaatggttatgaaatgaaagcagaagaggaaatgtttccataaaaactgtttggttatctcagatctaactacggagaccctggagtcaataggatcagaagtttaaactaagcctggtttagttaggaaaccaacaactgatccacaaaggggaggtttggaagttgtattctattcaaaattaacctgctgcaaaaagagctttcagtgttgcaaaactagcagaagcaggtagggaaatgtgaaagcaaaataagatagtatatttcataatagtatatatcttcttaaggaatcctcttgacataaaataagcattcccaaaacgttattattattctcctaagtcttgtttcttcttaagttctattatcaagacaatcctgagaactaagaagggaaaattttattatccactcaaaaaagctaaatgatctacccagtgttgcataaaactatggccttatgatgcaagtttggtgctctttctattccaataccagagcacacaggacttggcacttcaaacgtgatccctgccagggcagggaaacccaggtaccttcatgaaatgtcaatcctgctttggaggcggcaaccctgaggagctctcaggcagcacaaatgcaagcctgccagagattgtcggggctcaggctcagcatatcaagaggtttacccttgtcttcacagttgcacaagagagaatgctgccatcaatcataaagaatcacttccagaaatatttggaagtctctggaagaccagcagtatttcaagagtgtgctggttggcaactttgtagcaattaagaaatgaatgaggcacattcattttgctcaaaaccaggcaagaagctctgaaggattattgactctgcttcttttatctggaccatccactccatctgcagttcctgtcaatcaacaactaaaggtcttccaaggtttgccccataaatagtaattaataaaaaataataaaacaatcttgatgagcacaagtgcaagtcactgaatactttaatgcaggtcaagcaatgtgcaatgccttttagattcacctcatttatttcttcctggggcctgaccctgagaagcaggtactattcatacgcccattcttatggatggggaaactgaccttctccagtgttacagggggagacagtagtagagctgtgtgtctttcttacttcagaaccagggctcttagacattccacttcctgacacaacaatgtcagagttaaggctttttatcatagcttatctaaactatactccccacaccagcatccctaaaaccaagtctgaaccatatccctcccttctcccaaaatgtatagtagcccaagatagcctccccactccagcccaagctcttcaccatgagtttgaggccccagccaccaagctctgtccaggacacctccccatccgagagtcagtgccccctcaggcaccatgcacttcatggcttatggtgtcccctcagttgaggacaaattccctcttacccaagtcttaccccctcttcaagactcaatacaaacaccaccccctccatcaggcttcccagggggctccatgggatcgagtgctccttcctcccttctccataattcaggttggccagaaccagtagggacgacccgaggaattctacttggacccgcatcatgtcctccccactgccttgccctctgacggccctgtgctcatcctcagtgcgcttcctcagacaagcacacatttactgaatacagagcttataccaacacagccatgggggtgagcacaccacactgcctttcctgctgggcagtatggggatgagtccctgccagggtgcacacacccacaggtcagaactgtcttctttccctcccaggaggtctggggtgtgagggcagaagaggcccacttatccgtgtatacccagcaggaactcaataaatgtatgttctaggaaaggtgaaaagggggaggaaagacatgaaaggaaactgaggccacgcaatgacagtggtggaccaggctagccatccctcctggaaactgcaggacacttccatctacctaaggggcctccaacaacaggcaaaatgaggggaacccacaggtatgggctgtctcctctttggaatcctccctgtgcagttttctgcatgcttcccatgttcagagtgagcccagggccaaggcccagcagatgcatgcacaccctggaccaaatcctagcactctgaaaggcagcttccagcctgaccaggctgcctgccttctgctgggcagtgagtaacttcagtgagtaaactcaccaccctaccccatgccaccacctctaagacagggcagacactgatgggcgctcagcaatcacaatcctggttgggaccttttgactgagaatgccctttcccatcagagaaacactgatggctccagtgaattcaggatacttgatcaggctgctaacacccatatggaaaaagctcttagacacaaaaggttggaggtcaaaagtttaaaagctcatgacagaaatgacaggggcccctttgcccccaccaccacctactttttttttttttttcatcaataacatcaaaggctctggcatgtacttaatgctattattgttacgctttggaatccattgaaattccagcatgtttactgcacactgggagcattaaaaggctccactttcttgtgtcccttaaactctgaaccctcactgtctaagaagcatcattgtttgcagaaacacataaagctttaaagcaaagagtttgttttaagggtttctttcaccatgactgtaaaacaataaagcacacgacatggcttccttgaaaggatgagcaaggaaatgatagaaaagggagagaatcccccgctgcttagaaagaaaaaaatccacttcacatttcttggctcatgggagtacaagtagaaaacattccccatttttcttctatttctcctttctctgcaaccctatgttagccacaagctgcacattttacacacacctcaaagacattggctatgtgagcatctatcaaatggtatcatctgaaggagtccgaaatacctttcttctttagaatgccttctcaagtccaccgtccactttgcagctacctcatactcattgctggatgtgcagataaaaagccccacagctgcctgcaggctggttcagaactactccaagctccactctctgaagttcccactagtggcttcctctcttgttggctacccttcccttcctcgcaatctcatctggcttcctattttgattcttagcttaattccagttggaatgctgaatgaatttcagactatctctgaccgtccaccccttagagcacctgctcctatggtaatgccttggatgtctaacctatgctataggcaagaggcatcctgcctgggcctgcaagcccaccatgcccataaaaggcagaggccactcattgcccactcttcccctccatgattcctgcagtccagacaagctaatgtgctcagacacatcccagaggaattcagtttgccagcgttctgttttaggactggggaggatgataggcttgggggtgtcaacaaacctattcagctgggctctgatggggactctcctctctggggaggcagtggtcctgaggctcctttcactgagcctaggccactggctgtctgctgcctgtgcttccctgaggcctcaagctctcttgcgcacttccgcttctgcagcctcagtggtgatctcactggcccttcatctggactcagcagctgcttaccttgtctaacaagactcaggctctaatgtgatctccatctgagtcctctcctccctctctacaaagtaacccctggcttctagaccagtcttcataaactatacttggtaggtatctgatgtcaatgatgtccatgtgctccaagtgcccctaaggacagagaacatggtctgcttctggagtctgcatctataccttgtacgcctaggtccacacctacagccctagggactatagcctcaacacatggatgcgtaatagtggacacactcacacaaagatgaccccaatctgcacttcctcaatgagtttccactaatcagagggtgtggcctacactcattttgagagtgcaagactgcttctcatgcttctttgctgtttccaactgttactaatgacttgaagcatgataatacgggatttaaacaaaacatttgaaacaaagcatggatttaataactgacactaggcaacagaccaaattgatggcaacctactggtcatcttgacaccaatatatacttgtacagaatttatcaccctcaatatgaatccttagaaaagccatcctttctactgagttttaccttctccaaaatcgggaaaaggccaaatactcagcacactgaatgatgcatgctgcaacccttggctgggtacacccttcccatgggaatttatctgctctccattttgcccaaggcagctgaaaaggctcccccatttaaagacgtattttctagatttctataaaaacaaattacaataatcactacagccataatataaattttctttcatccgtaaaataaggctagtaagacttaactctgttgactccacaaagttgtacaaggccccaggtgacataagtgaaggtggttcataaattctgaataacagtcatgcatctcttaacaatgggatgcattctaagaaatatgtctttagatgattgtgtcattgtgtgaacatcatggagtgcacttacacacacctagatggtggagcctactacacgcccatgctgtatggtatagcctattactcgtaggctataacggtacggtagcatgtccccatactgaatcctgtaggcaaccgtaacacaatgataaatattggtgtatctaagcatatctaaacatagaaaaggtacagcaaaaatacagtattaaaatatttttaaaatgctacacctatatagagcacttaccattaatggagcttgtaggactggaaattgctctgggtgagtcagtgagtgagtggtgaatgaatgtgaagacctaggacatccctgtacagtactgttgactttataaacactgtacacttaggctgcactaaatttatgaaaagtaaagtgactgtactatgacgttatgatagccacaatgtcactaggtgataggaattcttcagctccattataatcttatgggaccactgtcttacatgtggtcagtccttgacctgaatatccttaggcagcacatgactgtacccatgtttaagaagtcaccgttccttctaagtccttcttcctcaacataaacacccaagttaccatgagagtcaacaactttatgtgggtgtcttcagctttgcaagtaatctgaaggttcaggtcatgcttctctcttgccctcaagcattctctgatcataagacccaggaagagtcctccatatctctgtccctaagtaaggtctgtggcaaggacctcactctgtctcctgaacttcacactagacagacactgtcctcagcttaaccttcagggaaaagaaaaaaagttacagctacaaatacgctcaaaaaagaactatcatttactgagcactcacaggtactaaggactgccctaaacactcttcatatattttcttgcttataccacatgacaatctaaggaagtaggtattcatatgctattttgcaaatgagaaaatagggatagagaaggtaagaagttaaagtcgctcagttaggaactgacaaagcttggcctcaagtccagatgtgcctgactacagtgctctgtaagctacagcagggccaactacccaggcatggggcctgtgcagcccctgggcctgtggtcagaagggcccgagcatggtttaatgttacgcgcagtagccgtcttgaaattcttagtaatttttcaacaagggctccccattttctttttacactgggcctcacaaactatggagctggtcctgagtacacctgtatttcccacaaaagtactcccacttccaaccttctctgcttcacccttgccaacgacaaaagctaaaagctgctaacagacattgtcatgggtacactgggtgattgcacacatcctgccttcactgcccaggtacaggtcccctacctcacccaggccctgcctcaggcttacactttggtccccttgccccagtcgctcagacacttctcccaggcaccagggacccagcctagcaggcagcaggcccctaaccaggccagatctggcagaacacgggccagacatcaaccccacgacgatgctctcttgctgccactggggcctgcgcacactgtgctaacacagtcgccatccaccggcctgctgtcctgagggctaattgggcttgtttagaccgaacacagcagaagtccctctacacatatataaatcacaattactaactgcaagaatccagccgctctcttctcccctcgtggctgctacagaggaattcccaggccagccaggactagcacaaaagccccagactgggctgcagcaatatccgctcgctcggctcagtttattatttaaacagttccttaacgattcttcccggaggtgagtgaggccaaactgttttccttccctccacaaagcagatatgcatggcttatttgaatgtcttcaacgtttactttagtccccagttaaataccttctaccgcagagtcaaacaaacagttcacttcattagaaaggcaaacaatttagcaagagaataccaccagcacttgaggggaaccaagctgggcctcgaaaccctctgcctgggaagcagggccagtggcggcccaggcaacagtgcgtggagctcacttcaaaagcctttgcacaaatacttcacacattcactggtaattaacagataaccccgaagagattatctgccctgcggccaaggaccctggaggattatccacaccacccgtgcaggagaaggcagagtccaagagcacacctttttctctgcaaatgcaagtggataaagtcatctgagaaaacaccaaagcgagcagctacacctcccctaccccggtgaaaataataacgaagcaacacctcattaagataattattaatttaagcaacagccggaagttgtgcctgagaaaaacacacaggctggagcagcaagaggacacagggatggaaagttcaagacaagaaccagggcaggagcgcaaagcccgtggtgtgctgtcaggattccagctcagaagtggagacaacgctgttcccaacaaagacttggggcacactgaaaacactgtgggggctgaccatgagcaggttaaagtctgggcacttctttgcgagagaccctgaggcagggtcagctgcccattgaggtttgaagccatctgtcgcacagcaggcaagccccgactctcagtccagtgggcaccgcactgccccggcttttatctcagaaccacaggaggaacgcaccagagtcagctcttcagttgaccaacagatgacaggttatacctatccatccagggcacaggatttggggctcatcttttattttatttcattttatttatttatttatttatttatttatgtatttatgtatttatagagacggagtcttgctctgttgcccaggctggagtgcagtggtgcgatctcagctcactgcaacctccgtctctggagttcaagcaattctcctgcctcagcctcctgagtaactgggattacagacacccgccaccacgcctggctaatttttgcatttttaccagagacgaggtttcaccatgttgaccaggctggtttcaaacttctgacctcaggtgatccacctgcctcggcctcccagagtgctgggattacaggcatgagccaccgcgcctggccaggatcttgtttttaaaaacagaagggcgcccagcatgggcaaatcacctgaggtcaggagttcgagaccagcctgtccaacatggagaaaccccgtctctactaaaaatacaaaattagccgggtgtggtggcacatgcctgtaatcccagctagtcgggaggctgaggcaggagaatcacttgaacccgggaggcggcggttgcagtgagctgagatcgccctattgcactccagcctgggcaacaacagcaaaacaatgtctcaaaaaaaaaaaaaaaaaaggttcccttctcttttctacataagaaacacatatactcaccaccactgtcccccatatatacggttaccacaatcgtagacagtaacatcaaataaaaatggggtgggtggtgcagctgttcctattatacttaaatttgggttttcacacatgctgtggttgttctggacagggtcagattaagcaatttcagtgcttatggctcttaagaatttggtaaacctcaaatgccaactgtaataaatcatacaagtctctattataactataaatcactataaatcactcatgaaatttaatactgtcatgaagagtaattaaatgctaatgtaacaaatttacaaaaggaaaaacaaacacattaatggggaatcttaagagctagagaacactcctgtatgggagctttcagaaaaatctttgtccccaaagaataaacactgtttctttatccaaagccagaggtcctcaggaagtgaaaatcaggaaagggccacactccccaaataaactcaggactgagtgctaaagtccaactcccttcttcaatgcagaaaaaagataccaaaaattgactttcattctgcattatcctactaaggaaacagagaggaagggcgcaaaagtcaagcaggagatgaggagaggccagtgcccaagaagggtcttggggtttaaaggaagtttcaggaaggagtcacagtatttccctcaaggtcactatctcccttgcactgcccgcccttcaaatcattgctgggttgatactcagctgttcttagctcttcaacgatgctgactcttaaagtttagacaggacaattagaaccacgaattctgttctgtgctgcttcagtcctaacacctcaggattcagtaagtagttgctgaatacaggaacaagtcaaaaccaattcactagacagggtgtggtggctcacacctgtaatcccagcactttgggaggctgaggcaggtggatcacttgaggtccggagttcaagaccagcctggacaacatggtaaaaccccgtctctactaaaaatacaaaaaattagggcatggtggtgggcgcctgtaatcccagcactttgggaggctgaggcaggtggatcacttgaggtcaggagttcgagaccagcctggccaacatgtcgaaaccccatctctactaaaaatacaaaaaaatagggcatggtggtgggcacctgtaatcccagctacccgagaggctgaggcaggagaattgcttgaatctgggaggcagaggttgcagtgagccaagattaagccactgcactccagcctgggtgacaaagtgagactctgtgtcaaaaaaaaaaaattaattaaaaaaaaagacaattcactctgcagatctaagcagcactgccaggtaccaggccccacggattcccaaaagcctaataagccagttgctccaaggagccccagaggggaaggaagcacgtggactgaggagtcacaaagccacccacaagcacaacagctcaaaagcatcccaggtccaaagaccgcacatgagggagcagtgggcagaggactaggtaggggaaggatgagggccagaggaacctcctctccttgaggaaaagccttgctcagaaaggtgaccaggagtgtggagaaaagacaccacagacaagcacagcctgctcgggggcaagggcgtgcttggtgactcctaagcagctcagtgttgctttccagcatcggtcctccaacttgaccttgcctccaagttcctgcagagcttgttacaatgaagactgctaggctccaccccagcagtttctgactcagtaggcctggggtggagcctgagaatttgcattcctagtaagctcccagatgaggctgctgctgctggagaccctccgggaaccacggaagcgtgcaagaagatgaggccaggcctgttcagggctcctacaccatgcaagagagcacggaaggctcagcaggagactggaatgatcaaacacatcttttggaagtattactttggtggtaacatggagaatgggttggagtggaatgaaatgaaggtggagaacaagagatgtaaagactcaaaaaaccaaggcagggcagtggaagggaaatgaatgggatggaggaggggctctgggagaagcagaagtaaaggacacaggagatgggtgagaagagaaagatggaaggtgggctgactctaaggttctggcccaggtgagtgttaatgatggtcctgggaccaaggcagcaacagagaaggaagcaggagaggacacaagaggagggaggagaaagcatggattcagcctgagacaggtggggtttgaggtgaccaccacagccaggctcctggtagatgtctggagggaggtggatctgggatttgagagccacgtctagcctggagatggaggcgggagaggcgatcacaggagtggatggtgacatcagagttagtgatatctccagggaaggtacaggaagaggaaacctggagggaggctggcagttaagggatgaggggaggaagcagagttgtgcaaggaggaaataggagagacacaggacaaccaccagtcaggggcctccaaggggccagagggaggaggcagtttcaggcaagatgcacagcttccggagccagggtgtgtgcactgcagggagctgacgggtggagaagccagggtgaacactgtggtgcactccgggatgttcggctgcaaatagagaagacagggcagcagctagagaagacccaaggccagaagtgctgtgtggatgttttgactctgtttgtttatgggtggaaggcactggagccaccgaagtggaggaagaatgaagtgagaaaggagagtaccgatggagtcagggtccctagaatccagaataggacgcaggttagctcaaactcgcttccccagaaataaaggagagggatgggagagtacaggaacgggctggctttaaagagtgtccagtgtcaagtaaagcacctgatctggtcccacccctaaacagcaggctcacgggagaaacttcaaacttggtagcattgctgagtcagaggtcatggtttaaaaggggagcagggtacagggcattcctcttgggagtttcagcctgaaggacgcattcaaagcggtcacacctttgctgcccactggcaaggagaactgctaagatcctccaagagcgggtgttcagggtcccttcagactcctgaccctccactttgcctggagcagccacatccctctctgcctggagagggggaaggaagagattccagaagccaggtcagagcatggagagtaagcagcaagggcccagagaactctgccatggaaatcagccatgaaaccagactccagccacagagctccaagggcctggtgccatcaaagataggttatctcaaaagactgttgcctaaaagttggatgtgattgtgagggttggggaaacacttggaggctgtgctgcagtggccaggccaagccaggttttacaagttcacagcagctgcggttgctctgcggccagcctaagggatgtttaataaaaagctgtgctcaatttcacccccttcacatccctgaattcagcctctttatttatagccccagactaggcatgcagtgggaaatcagagaggccaggaaaaggagagggaaaggagacagacagagatagaaggagttaacaggcaacagcttttaaagggtaaagcgtttcagaaacagagaattcactggcactccctgctgcttttattgctttcgttcaacagctggagaaaatgtttgatcaaaatatttgtattattgtgtttaagtgaaatgacatatgacagctcattatcccaaactcagaattcccacagcatctgtcacagccaccctattagagacagtcgctccccctggaagatggaggggcagggggcgggagatgtgagacaggaagcagcaggcatcagaccccagacggtctcagcctcacaggccctggcccaggctctggttaagcacgaggggagatgctggagggagacgcaggtgatgcctggggcctaccccgggagccccccttcccctggacaccagcagcctgccaggagcacgggacccagcaggggctctcgtgtccatggaaatggccaggatcccctctcttagacattacttggcaaacagcatttactgatctaaaatttaacaaaatgtctctctcaagcctttgtcctttgaaagaagaaaaaataactttttaaaaattatcatgccattttctctgtcctgaagtgagtaaacgtgtaattctgcagaacttggctttatgagcctacgttcctctccatgacaaccttcaagggcctcagttctgctcaggccatgtccttctacgacacccctagtggacagatgtcagggtatatgttctataccagacataccagggagggaaaatcatctaccagctgcttcctgtgtgcctagcccatttctgagaacttactggccttattcaaatcccatgacaatcccaggaggcatatgatattatctcctctttgcggatcagattatgctcagagaggttaagcaataagcccaatgactcacagttgaaaagtggaagagtgaggacctaaagccacagccttgactccctaaagcagatttattttccacagcctgcaggtatgaccacagagagaaacgacacgtgaagaagagtgctcagtggctgtgggaaggcaggaatcaatgtggatgtacttgcacatgccctcctcatcacacgctgaacaaattctcattattagaccatagaaaagtttgtttttatccccatctctctgtctctgtgtaatgtactaaaaactgacccacgctaacggaaaaagatgctctacattttagccccatgtcagccatttccaaaaaaaaacctcaggggccttccctcttgaagtttttgagtcccagtttcctcacctataggatcagggaggtgatgtgtttctgtttcatggggctcctattcgatgtacagcagagggctctgaggcagttccccagaataaccttgtacacatgactccatatctctgaacatccattttctcaggtgtaaaacctaccatataaacctactggtcattttaggaatccaaaccaaaataagatcgtgtttataaatatgctttacaagctggaaagtgctgtgtcaatttaggctatcttccaccctatcatttgggactaccacaatgcctcatttctagcaatgcttttcaccccaattacaaatgtcccttattccccattgggtcagatttttcagctaccccaagagaaaacggaaataaaatgggcccagtatagaactctctttatcctgcttgggtacagagaggataggtcgcaaatatcacaacccaattcctatttattctctcagagtgttttgaggctgaaatacataagcttgcgtgggtagaagaggggacccttgtgggtgatcctaacagtggggcatccaaaaggaagagctgtcgccattcatccagggatacatctgccctgagagtggctctatcccctgcctgctcccccgtgccaaggagagggtggtgatatcaaggagtacaatttaccaaggctgagtgagttctgcccagggacttcatgctccgccctcttccccactatccacatagggatccctggacatgccattttcagagcaaccagttgctacattgatagtaacttgacatgtttgatcagcttaaggccaaaacttcgggttaggaaatacatatgcaagccaaggtttcacattctcccaataatgctcactttgagtgattacttcctttgaattcgacaccatctcccatacacattgtttttataactgaaaagcaatccaccaaccaaccaatgactcattcaatcaatacatgaaataattgaaatagagcatacttaacaggcttttttcgttaacagtaaacatatttgtaatttactagatttgtttttttctgtaactttaaatttttgtgcaatgaacatattatatttatttaattatttttagagatatgttagtttagttagttatttttagagacagggtctcactctgttgcccaggctggagtgcagaggtgcgatcacagctcactgcagctgcgacctcccgaactcaagtgattctcctgagtagctgggatgacaggcactcaccacacctcactaatttaaaaaaaattatttgtagagacagagtcttgctatgttgcccaggctggtcccgtacttgtggcctcaagtgatcctcccacattggcctcccaaagtgctgggattacaggcatgatccactgcatctggccatgatattttaaatataagacaaaacacactttcgaaacagtctgacattctagaagtctctgtgacagcatgcacatgccaaagtattttctctccatgaggatcacgggcacgttagtgccaatccactctctttctctgtaaccagcatcaacatgtctttgtaatgaagagctgctcattggataatgtgtttataaagtctgtgtcatcctcttcaagtctaaacacaggcagctttctcatagcaagtgggtagttaacatgccaagtcaatcaataccagtgtctcccactcccaaccccagtattttctcacggagctgaaaacaaagacttgggagctgcccggtgcagccaaagcacagataaagggactgtgactgtgaaagtccagcagcatgtggccaccttctatgctgtggaaggaggaagccacagctgcctggtgcagtgggttgaactgtgtccctttaaaagatatgttgaaaccctcacatctggtatatgtaaatgtgaccatatttggaaatagggctttgcagaagcaatcaggttagatgaggtcattaggatgggccctaaatcaatactcctagtgtctttataagaggggatctgtggctgggcgtggtggctcacaccagtaatcccagcactttgggaggccaaactaggcagatcgattgagctcaggagtttcagactaacctctgcaacatggtaaaaccccgtctctacaaacataaaaaaaaaaaaaaatagccaggtgtggtggtgcacgcctgtagtcccacctacttgggaggctgaggtggcaggatcacttgaagccagggggcgaaggtttcagtgagctgagattgcaccactgcactccagtgtgggtgacagagcaagactctttccaagaaaaagaagagggggtgggggtttgtacacagacacaccacaggaagacagccatggaagagaggcagagagtgatgctgccatgagacaagaattgcctggggcttccagaagctggaagaggcaaggaaggatcctcccttaagatttcagagggaggatggccctaccaataccttgattttggactttcagcttccagaactgacagataataaatttctgttgttttgagcccccagtctgtggtaccttgttctggcagtgctagcaaacatacacacctgggtttccttacaattttgttttgggaaggccgccctataccagtgacttttgaagaggctacattctcttctcctgtgagtaggagtagcagtaaatattgacaagaaacaaagaacctaacaaccctcagaagagctgagaagaggaaagcatgtgcagtatgcccatcgtcattttctggctgtgaagcatctattccttcttcccacagaactctgatttcctttgcagaattaacttctctcctactgtatttaggcattctggggtgataaataaaaaatccaggactggcgtggtggctcccgcctgtaatcccagcactttgggaggctgaggtgggagaactgcttgagtccaagagttcgagaccaccctggacaacacgtcaagacctggtctctacaattttttttttctttaaattagccaggtatggtggcatacacctctggttccagctactcatgaggctgaggcagtaggattgcttgagcccgggaggtggaggctgcagtgagccatgttggcaccactgcagtccagcttgggcgacaaagcaagactctgtctcaatttttttttttaaatgtataattgctttaatatgctgctgaatttcgtttgctagtatctttttatttatttatttatttattttattattattatactttaagttttagggtacatgtgcacattgtgcaggttagttacatacatatacatgtaccatgctggtgtgctgcacccactaactcgtcatctagcattaggtatatctcccaatgctatccctccaccctctcccaccccacaacagtccccagagtgtgatgttccccttcctgtgtccatgtgatctcattgttcaattcccacctatgagtgagaatatgcggtgtttggttttttgttcttgcaatagtttactgagaatgatggtttccaatttcatccatgtccctacaaaggacatgaactcatcattttttatggctgcatagtataccatggtgtatatgtgccacattttcttaatccagtctatcattgttggacatttgggttggttccaagtctttgctattgtgaataatgccgctgtaaacatacgtgtgcatgtgtctttatagcagcatgatttatagtcctttgggtatatacccagtaatgggatggctgggtcaaatggtatttctagttctagatccctgaggaatcatttttttaaaaaatccatgagcctcactgcccaagacagccagggtacctggctctgatagcagacggcctctgctgaaagcctgagtcctgagcctgagttgggggaaggagaagcagtcagagctcattcccccagggagactctcacgcctgcttcctatgcctctacagcacctgcttctcgagattttctgacaattttaagacaattctatgtcatcccagcaattcctgttggtgcaagggttggaatcagtttctgttgcatgtaacccaatagccctggctgatgcaggaggaaaacctcaacagcccagccaccgagcagctgtacaggctgggtgtgcacttaacttcttgggcttcagtgcctcaccaggcaagttacaccaaatctcttcccatgcctaggattagaacatttatgattctaaatgtttctgctataagacgtaaattatctaaggctcagacatggtgagctgaactgcaggtgaacagcaatcctgctccggcttgtccctaagtcaagcagggtcatttgaaacttttgtctttaacaaccccctgaatacaaggatatgggagtgccatctcagttcgccggtcacactggcgcagaaatgcctaattgtggcatattataacatacagcaaactcaaagcttaagacgctttgaactccattctgcagatagatgctgagttaatcacaattgaccttccatgtagcaggtgaaaatagtgaacatgtactaactcacacttttggagggtagagaatccggaagcggcttagctgagtggctccggctgagggtctctcaggaggctgcagtcacctcaaggcctgactgggggagagtatgtttccagacttggctcctccccatacagcctctccaccagctgagtgtcctcatggcatggccactgtccaccccagagtgagggattcaagagggagggcaagagagccacctgagtcacagtccttttgtaatctaattttagaagtgccatcccatcacttcactggaagtaagtcattaaggaaagaggaaggaagtcccacctcctgagggcaggagtatcaaaaacttgtacacatgtccttaaaccccccacagtgccataaatagctgaactttttatccaatctccgatttatacagtgacatgattcaaagatcaaatgtatcttattaaaaaaaaaagcaggactaggaggcaaaagactgtggctttgattcaagttctgaaagcagctcactatgtaattggggaaccaagataactgattctccaagatacttagggaacctctctgcaactatttcttcagctattacactttggccaagtgctatgcttaacacacatgacctcacccagtccttttcacattccagtgacgtagatatctgaatcctcatttctcagctgcgaacactgaggcataaagacactaaatcacctatccaagagcacccaagataacccaagataaggagtcaggatggggccctaaatctgtctctcaagcttcagatgtagattggcatgtgaagagactcagaaaagaggaaaaggtagaaataaaagtgctacaatctgataatgcattaccatgaaccataaataataacagagttaataaaagaagtgagaacaatagtaatgatggtgctgatgatgatgttaggcatgtgggtgtcacgtgaggggccagctgactttctagtattcactgtgcatctctttccttgactgttcactgtatctctgaggacgatgtgctttgtttggtgccctgtacaagtatatgagcatacttacggtctccacttgaagaagatgaaagcattgaaaaataaaatggtgccagacagttaggccagtagttaggaatctatcatcttcagtaaaatcctgaacttcacttctccaaaagtcaacattagtctaaattaaagatgttgtcagaaaagaagataatgcatcacgtaaaacctacctagacatactgcgtacccaacatccttcagtacccagttcagtctcctgtgaagacgccctgacatctgcaccctccagccttgttcacacatccgctctagcatttcccacttcccatctctacagtgggtaaacaggcagggcgggaaaaatgtcttactaatctttgaatcccataaacacagcaaggaatctggcataaagtaggcatttccaaatatttactgaatcaatgaaccactcctgagattactatgtgtaatgggtgtgagattatgaaatcatcatttaataaacacacatttctgagattcaaactcttggcttaaaaaaggtttaaagatggattgattcagggaaacatttaaagttacaacattgctatagactgaatatattcttctaaaattcacatattgaactctaatccccaatgtaatggtatttggcagtatggcaactgggaggtgttcataagggtggagcccttatgaatggggttccttttaaagaggccccagagaacctattggccgttccaccacgtgaggacacagtgagaagaaggccatctatgaaccagaagacaggtcctcatcagacaacaaatctgctggcaccttgatctgagacttctcagtctccagaactgtgagaaataaatttctactgtttataggccactccatttatggtattttgttacagcagcctgaacagattaagactgtgatactgccaggaactttgataattattatctgaatttatccaaagaaacactgtgaaattgccttcattttacaggtgaggaaactggggttcaaacagaataaataatctgccctgggtccttcatggccagtcctgaagccgtgtgtttctaactcctggtctgacatgtgcctgctactgtgtgccctgaattcaagtgggcaaattcaggaaggcacactgaacttggcttgatgtggactgataatcaggtactaaatggctgcttctttttttttctgtttcataatttacacccagatttggaaagatttggaagcagattacatctttatcacccaaagtatgttttcagaaagaatcttgtttctgagaagcataaatttagtttcaaatatttataaaaattactctaaataaaagcaaaactccatgaaaaagaaaatgcactggcatagagagaaaagcgagaagcgaaaggaagtaagaggaaaatgagagatggggagataggatgacgccgtggggaaggagaaagaaaatcagggaaagatttaaaaagaagataatatgtacttaagttaatcacagatgatagaaaatcttttcaggaaatgtacatctgaatttaaaaacagcattctttagttccacttcatcaagcaaacagcagaatctgcaaggtgtgaatcctcccacttagggctgggccttaatagactgtgtgtgtccagtgctagcctcgggggaaccagctctccatacacatctgttgaatggaaatcaattttcctcaagcaaagaggcagctctgtctctcgtaaacaagcacctccacgtctgcagtcacataagactgattttaatgagcggggtgtgaggtcacgcccgaggtacatccgcttatccaaggggcccagacaccccaccaggaaatcaaatttctcagtacatacctcaatgatgaaccttccttttagcccctaaaggtttctctcatcctttttgcatttggtttttggccaagcaggctggaaagtataaaagccaaaagaggcaggggtggagcagccgggcaagcaggaagaagcatgtgttttctggcctccatctccccagcagttccagcatgttccgtaattgggcagcctggcctcaccgtccaacaggcatcctcatgcagcccgcagtttccatgctgctcactgtaaatgtctgatatctgcacgtcctctgagagcacagcccagaggctgagcatgctcacagacacccactcagcacctggccctcagaactgtgctgtccccagcctaaggcctcagggtccaatgcccacccctcttgctcctgcagaaatctaggctgcaaggtgctcctaatctctgtgtccctccagctgcaataggaaccctagtcacaacagatcttatggccacatgagcaaggacgggctcctgccaaggcatctggtagcttcctgcccaggtaaggtgggcctccctggtgggctctgtatttgttttgctgctggacagaagagctccttcttttagaatcatttgcagcagtggcctctacatactggttggaaatctataattatatggaataaatagacacaaaatgagaacaagaaggattgaagtgatgaatgtttcacacagctaaagttactcattttcaaagaatgtcctctgctcaataatctgttcttcctacttcgtggtgtgaaaacagcctttgtgttgtgaaatggtaatgacagcagagaatgctctgggaattgtttgctattttccagtgtcccaacttaccccagccctgccatgcccatatttggacaaatatctggtatccctatgttggtatctgccccacagtatttttttggaggggagggggcggtggggagggcggatattttttccatttcttactgccaacaatgtgggaactactgatttgtagtaattaaagactgtgaagatttccaaagagagaaatggaacacaaaattgtgtcaggtgtggcggctcacacctgtaatcctcgcattttgggaggccgaggctggcaaactgcttgagcccaggagtttgagaccagcctgggcaacacagcaagaccctgtctctgctcaaaataaaataaaataaaataaaataattagccaggtgtgaaggtgcaagtctgtagtcccagctactcaggaggctgaagtggaaggaccccttgagcccgggaggtcggggctgcgtgagccgagatcacaccgctgcactccagcctgggcgacagtgaccctgtctcaaagggaaaacaaacaaacaaacaaacaaaaaacagaaacacaaaagcatcagggtagctaaaaagaaatggcaccaactcatgaacttgcacagaagcacggagtgtattcaactcaggcgactgagggtatttgggcataagaaacaggtcgcaggacaacagtcacagggctgacactgaaggcaggggacagcgagagttctgcccttgctgactgagaatggcactgagggcaggcgatgcagaggggccagagaacagagcaggagctggcagatgagaaaagtggagggaaggtggctctcttccagggtttttgtgaatggatgggtggggagtatttcctccacattccagaggagggaggaacagtgacaaggccagagggtggagaaaggcttaaggaatctgtctctggggacacttcacaaatgcacagcaatctctgcatctcttcacgcctgctcaaagaactgctgcctgctatcagcaacgcgacctgtgttttgtttccattttgtttactgttgttgttgttttaaaaaataaccaaccttgccggtggcgtgctggattttttaaactttttcctcttcactggcacactcacaagtttgtttagtgtaagtctgagaatccaaaggggttttatgtgcctcacattcataaatcctcaactgcttttcaaccaaatttattgcccctgaggattgagggtgaatggaagagtcaaaaggaatctcctgggctagaaggagaatgcacagagctgtgtgcacacaatgtcaaatatccagatgaaaagtgaaaacttgagcaaatcctccagatgcttccaaggacctgaatgcttggtgagtccgcagaaatacgtggatgcttaatggaactttgcaccgttagtagcaatagttagcactgtgtttgtacagcccaccacggaattcacagatgtgtctagacttaactttgtcaatcctgataaattaaaaatgatatgttatgcctccctctagagtcatgaccagcatcttcagattagactagaaacctctaatctaacagattagaaaactatgcctcttctggggagacctagcccctctggcactcagcttggtgagctgatggcgctttccgcaaactggaaagatagactcttcctctgggtagcttggtgagcagagtatgtgttcaagtttagccccttatttctgtcctttgtgcagtaaacacccagcacaactgtacacagacaccctgcctccctctacagtgcccaaacacaactcagctagaagtctgaccatttcaaagtaagaggataggaaataatacatgattaagacttctttagcataagccacacacacaaatagattccacaattacagagggaaaaagaaagagaaagggaaaggaaaagagtgaagctgccctaaaatggcttaccttagcataataaaaccatgggatttcagagctggaaggcatctttttaaattatctatttatctattgcaaccatcccttgcaagaatcctttgcacgacgtccccatcccaccctccaccagcagtcatccagcctaacctgaaacaccctcccacccctgtctctgagaactggaagtctgacgccatcaccctcctttcacactgctctatgcacaagaaatcctgtcccctccaccccaccacactggcctccctctaacttttgcccagcccatcaatgcatcttagcgctgcattctgacgccacctacattaagtgtaattgcttttctatgcgatagctctttaagtactggtagacatttaaccatggccccctacaatcttttgttttcccagctaaataaaggcaccttgctttaatccaacccctcctacaaaactaagttaactgccagcatccatgaacaaatctgcggttcatcacagtcactacagggcagccaagagctggataaagaaagacattgctttcactgacaggcaaccccatgttttggaaagtagaattcctggaagtctggcacctcaggaaatttaagtcccacacaaaccccatgggctataataagatattgctgatgttttggctgatatgcaccagaaagccttgggaggaaagtggcctagagactgtaatgaatgagagcataatgtcctgcccttgaagccacacaatcagaaagtgagaggactacagaaaaaccagcagggcactggcattttccagttgagcattctgagctgacagtgaaaataacgaatgaaacacggcagagcagaagtggactttatttggaaaaccttgttttcccggaactgaagctaacctctgggacgagaggtttcagaacaatgaagaatcaacaaataagatgaagagacgcctactgacaaagacaaattccataccctggaactggacatcttcctggcagagggaaacatcctgctctaaaatgggcacaatcagcagcagttatgaacgtcggcttttccacttgcaaaagaaagattttaactttgcctgacaggaaggaacactgaccaagaaaacagtaagttatggattactttgctacggatgctggctatacctctttaggatactttttttatagaaaaccaagcattacttttctgtgaatggaattaagtgtcaggaatatgcatatctttcttatataaggctttgttttattataacagcaagaatcatgactgatgcctgaaggcggccacagataatgccaagaaaaaatggggtagtaagtggaagaatctcacaaaaaattctgtgtaacaaaaagacagaggaaccaacctctgtcttattcctttcttcaaatgtttccaaaatttattgttagtatctccatacaaataaattaattttcagttttatagtagaattcaattttaaaaattccttttacaaccaacttttctaaaaatccagcataggatacccaaataaaggtgcatctccattcattcatattttcattcattcattcattcaaacttcaacagatactgattggttggatgcctattatgtgtctgcatcatgctaggcattcaagaggccgtgtcagcagcacaggcaacggaagtggacattcgttatttccacatacaatcacctactttaaaaccatggtaagtccaagaaaggacaagcccacggtgtgaagagaaagccataataaacccggtaattcagaacagaggtcaaaaacacatgccctgcacagcatctacaaaacacaggaagccaacacttggttttgtgaataccacagtgttgcaattatcttaagctgtttttaagttatttccaaaatattatttttaattaaagtagagcacatactaactttaaatgatagagggaaaaggagggatttgcaattaaatgaataaataatggaaccgacacattttgtttcttttagtaaatgggttcctgaaaagcaacatcaacttattcagtgattgtctgccccaaggacagtagacacccagtgcaaaatggctcccagctctggttggtggcacatgagcctgtggtggtttgagaacgacaagagtccagaacagcacgagctttggaaaccagtcaaacttgggtttgaatcccaactctaccactagagatgcaaactctggaaggctattcatcttctgtaagcctcaatcttcttctataattactaccagagtaggaaaagcagtattaaagattattaaggacttactacagggttggctgaaataaataataagtaaataacaacttgcatagtctatcaacccttatccacactaagttttgccagaaagtctcctgccaagagtgagactggactgaggccgaaaacaaggggcaaggcatgcatgcagagtgctgggatcggatatgagtaccagcgaactacagcataagatctgctcaggtgaggcaagttcagcagtgtgagagtgttctcataggtgccaagttgcaaggtagctcaaggggtcagatcaaggggtctggacggtgttgtcagtgagtagctatggtctgagcaggaaggtaatcttgggggcatttcaagaagattaacaaggcagcagtatgaaggacagactggagaacagaaagtctgaaggccattaccacagcccagacatgaacaggacaccaggaatagaatggaggtgatacttcaagaaactgtgtcattttctatgggccaaaggcaggagagcaggcctgaggaaggtagaaaatgtttcaaatagccaatatcaggtgcatgagacacagcaacaagaaataaagttctagagcacttaagcttccctgaagctaagcaccttttctaccagctagctcacctagctctgttctttcctcagctcgctctctttagtccaggaaaaggagcacagaaaccaggtgggatggcttaggtttgcacagtctgtaacgtgatcatgagcattgcgggtaagctggaaaaacactagatgacccattgtgagcagtgcacccggtatggggaatgttaaagcaagatccagaaagtggccaccctagtgcttagctccagggtgtaaagccctggacatccaggaaataggagcccaagaagaggaataatagaaaatggaaccagtaaagacagacacagagcttgtgaaggacaaaaaagtgtgccagatgctgaagactcccacaaacaatgacaggggagattttaccccactattcactgcatgacaggaatttcatctgccgtctatgataatatcatggactctttctggaaaccaacgctttttctccaaatgcattatgcctcactgtgcatatctgggccccagaagactgtgtccactgttattataagcaggaagccagccaggtatcttcagttgatgaggaacaagatttgggctcaactgttcagtgacctacttagctttatttggttatatgaccacagaatatagttctatggttatgggagcaaaaacacagctagatagaatgaataagatctagtatttgatagcaaaacagggtgactacagtgaacaataacttattatatattttaaataacgaaaagggtggaattagaatgttcctaacacaaagaaatgataaatacttgagatggatacctcaattactctgatgtgattattacatattgcatgcctgtatcaaaacatcacttgtacttcataaatatatatgcccattatttcccataacaattaacattaaaattttttaaattaaatataatatacttctaatcccaaccaacattctttcaactaataactataaggatgcctgacatttactgaatgtcagaagaatctatgggctagaaacgtgttctccctatgaagaaggtaccactgccatccccactgtagaggtgcatatctgggcaccaggagactgtgcccacatgagatcatgcatcccagcctgcccaagagagaggagacattcagttaaaaataaataaataaatagggccgggtgtagtggctcacatctgtaatcccatcactttgggaggccgaggtgggcggatcacttgaggtcaggagttcgagaccagcctggccaacatggtgaaaccctgtctctactaaaaatacaaaaattagccgagcatggtggcaggagcctgtaatcccagctactcactcgggaggctgaggcaggagaactgcttgaacctgaaaggtggaggctgcagtgagccgagatcacaccactgcactccagcctgggcgacagagcgagactctgtctcaaaaataaataaagcccaaggaatgccagggatgctcgtatgatgtctgcatctctggtgagtaagaaatacagaagtacggagcagtgtgaagaagaagaggcgagaacgacccccggaccgaccaaagcccgcacaccaccacatcctgtgcccagcacctacgtcccgtcgctgttgttgccagcatgcccaagagaaaggctgagggggatgctgaaggagatgaagccaaggtgaaggatgaaccacagagaagatccacaaagttgtctgctaaacctgctcctccaaagccagagcaagcctaaaaaggcccctgagaaggtacccaaagggaaaaagggaaaagctgatgctggcaaggaggggaataaccctacagaaaatggagttgccaaaaaagaccaggcccagaaagctgaaggtgctggagatgccaagtgaagtgtctgcatttttgataactgtgtacttctgatgactgtacagtttgaaatactattttttatcaagttttataaaaatgcagaattttgttttactttaagctatgttgttagcacacagaacacttcattgttgtttttggaggacaggatatatgtccctaatagaatgtctctgaagctggactgatgtggggaaaacacctttccctttcccttctagttctgagagacttcctcttggctcccaggaggaggggggactccctgactttgatacacatgtccaccttggcacaaaaaccttgtgggagggaaaaacaaatttgattttatgtcctcttctccctttccacctttcagcataggcttaactcccttaaagccagacatctgttgggacatgatccccagtcattggttaccagtgtgtcacacaatctggactttccagtgatggcaatgagatggcacccctcaaaagagcagtggttccgtttctagattgtggatcttcagataaattctgccattttcattccacttcctgaaagtcagggtcagcttgtgaaaagttgttaaacaacatgctaaatgcgaaatgtcaaccctcactctaaacttaccctgttcagagcatcagatgaagacttattgggttttatcttggctttctgattattggtagtccatagaagaagggagtttgaaagttgttgtatactgttaacgactgtctacccatgtcctgcctgaaatacgatgattgcttatggaacatatcttttataaagctaggtacggtttggcttgggaaaaaaaaaaagaaatacagaagtgctttctcaatagcaggtgtgtgtgaaggattgaattggttattagggtaaagaggcttaggaaaaagaaatgtgtccttcagtcactgctaagtgacacatccgcactgtgctgtgaagttccaagaaccctaaggtcaactggctccttgccagtatatacctgtattaactcttccagaaatctagtggtgtaggtatgtatgtgtgtgcaggtcggggagagttttttgtttgtttgtttgtttgttttgtgagatggagtcttgccctgtcacccaggctggagtgcagtggtgtgatctcggctcactgcaacctccgcctcccaggttcaagcgattctcctgcctcagcctcctgagtagttgggactacaggcatgcactaccacactcagctaatttttgtatttttagtagagagggggtttcaccatgttagccaggctgatctcaaactcctgacctcaggcaatgtgcctgcctcagcctcccaaaatattgagcttacaggcttgagccaccgcaccgaccaggagaggcataattttaaaaataacagagcatttgcaatagtgaagaaataagaagagagaaaagggaaaaaaagggtaggagacaaaaatgtaaacctttttcttgtgttggccccaaataattttcctactttttttttttttttttttttttgagacggagtctcgctctgtctcccaggttggagtgcagtggtgtgatctcagctcactgcaacttccatgtcccaggttcaagcgattctcctgcctcagcctcctgagtagctgggactacaggcgccctgccaccatgcccagctagtttttgtatttttagtagagacagggtttcaccatattggccaggctggtctggaactcctgaccttaagtgacctgcccacctcggcctcccaaagtgctgagattacaggtgtacccaccgtgcccagcccattttcctacattttcggaaacttcaaattaccacagattttcaatctctgaatggaagccaatataattcatctcttcttttctaccaaactcctgatagttcaggtgacgtggatgttacattaactctgtcaggcccccgggctgctattaagtgccctgtaacactgaggtcctacacctatttccctacaactaagagtttttgtctcccaaagggccaaacttgcacacagcagggacacagtggggcagttagttgcttgggaaagagaaacaaaatttcttttgagagtgaggttattttaaggtggtcacaggtatgcagagtcagttttatgctctccgtgatttcttatcccctctgagagtgggaaggagttggcatagagatttttattttcatagcacattatataatttggggttggtggcaagtgttaacaactgtcatactacccacggctatattaaaaataagaccaaaatagagattgttgtgggttgtcttgggttttccctcagaagtcctgaggaagaaagtacctcaaatgaacagggagggcatcatcagctcacagagcagcctgggcaacaccaagaccagacagaaaccctttccaagcaacagagtggaaacaccaacaaacccttttcatgagacacacatttctgcaagacctatcttgacagaagccaccaggtcccaaacatgtcacatgtatgaaaaattcaaattcaaacgtggagaagagcagttttatgggacccgccttcaggtacagctccctatttaagtgctgagttaaaaacctctgcgttttgaacagcagcacacgagctcatgtgatttaatttatgtgatgaaatgtggatgctgggtaaaattcacccaggaaacagaggggagaagcaggatgctcaacccataaacaacacttatcctcagaaattttggccctttgaaactgggtgaataaactaaataaactgaaaagcttcattaatacccagaggatcaggtccaagttttagatctgcaaaaagaaaaaaaaaaaaaaaagaattaaagctttccatcccctttctaaatacgtggggatctgttttcaacccattcgtaaaatctatccatttgtttttattatatgaacaacttaaaaattgccagacagaccacctctgatgcacgagggcacagcattggttaccggagatggccaaagcattctccaaatcaaattaggtttgcctcagttacagaggtcatcttactgtatgttttcaggaatattaacacaaaatgtatcaaaacactaataggatccataaacacagacagctaaagctccatcacttttaacacgccataatttaataagaggtctcataagagacctcttattatggtctcataagaccgagggtgtccttttcaagttccttccctctcagctacttacggcaattctcagaagtctgcaaagttatctacatcctccctttaccaatgttcagccatacgcagatatcacttgtgaactaaacagtgtctttcctccagggacagggccaaggctacaacatgctggtgcacactttaaattgtaggtaaacgctcaacctatggcagaattccctattttgtgggagtcccagttctttaaactaattctaacttttggtgttggctttcaaaaattactatgtcaaggaatatgcgatgttgagatttcactcaatagattggtcagaaggacaggagggaggagagagaagaaaagatagtggtaggggaaggagaaggaaatgataccagcaaaaaggccagggctctggattcctggatgcctctttgagcaacgttttcattcgcaccacctaggtgcacccttatatgcctctggtcctttatttacaaggctgtcacctgtctgacaggtagttttacatgttttacatgttgcagtaccaaggaccagacgccttttaggaacagttttgagaatgacaagtcacttagacactcattgccatgactcagttttaagaaaaatgaccaatgactgagcattcctaatggggaagctttcccatctgatgggtgcgattctgacccaatgaaatgggtgcaggagagaagacattgagaactccagctttaaaagaggccaggactcgttagtgaaaatagttttgacttgttagatgcctgcttttgctgggggaatggaacaaatgatgtttcaggcaggagctgccagcacatgaacctccttctagcaaagtgtatgatctcagaggccatacatgttcatttacagtagagtttagattaaagtgataaatgtggatctggtgtacatttaaatgccattttgaaagaaaacccagctcgaggctttcccaccctacatatcactgcagattccgtggtcagggagatgctggcccttgagtagctgccgctgtctccatggaaggacggcaccatagttaattaaatgtccactctgacggtaaaattcattatctaacactgcaagtgaagttatcagaatatacttgatgggccaaagctgtcagaaggccctctcaaacacttaacaggaaaagataagatgaatttgcctttcatacagggatttttttctttttaatggaggctcaaaataccaacttcgggtttgcaaatattctcatcccctttaaagcttaatcatcttaatgaaatacactcaagggctttttcacctttccattattttttattttcttaatgtgcatgttaagtcccaaatagtttccacggatggcagcgttgagttcagagtcctaactatggactaagcagtttttatttcctttctcactgaattctccacagcagatctgaaaagacaatatacttatcctcaattttcaggtgatggatacaaagtttagagaaaatgaagagctagaaagtggcagtgccatgactcaaaatgggccttctaatcacaccaagtctaacacacagcaactagagacccctagcccccaattttcagtgtttttcttagattggtttttgattcacgtggggaatctcagagtttctgtggggcccagggggccatagtttcttttcgctcttaagcatcccaaaccatccttgccagcacccttgattgttctgcttcactaagaatgtgaagctgtcaaattcaggccagaatgacgtgatcatcttgacaccttgacactacaccacttccgctgcagccagggggcccagtggccttctgatttccaagtttaagttctcaccagcttaacttgctcatttgacacagtaagcatagaatgacaggctgtcaccactgtttaagagctcctaacgtacatgggatagctatgggtcaaaacccaacaaatcactgttttgaaagagaaacgaactctttcaaactctttcaaactcagcatcgtgaaacccaaaactatgaagggaagaacaccatttgggtgaccctttcacagttcagcaaggctccttcaaccactctccatataagcctcctgcaaccttggaggcagccagggctgtaggaggcaggcagggctgataggagcttccctcacctacaagtgacaaggctcagccaagggaaggagggacaggacagagcacaccaacaagggaagccgaggcctctgactcccgcactgtattctttcattccgacttctattagaaaaagggatcttgtcaatgaatgtgtcctgtgtctacatttctatgtaagcaaaacaagaaaaccaaaaagaacatgtgaggaaagcaattttcagtgtttttcctcgaccggtttttgaatcacgtggggaatctcagagtttctgtggggcccaggggctatagtttctgtttgctcttaaccatcccaaaccatccttgccagcacccttgattgttctgctacactaagaatgtgaaactgtcaaattcaggccagaatgacgtgaccaagaccagctgtaatgtacactctcttcttaaagtaagtgctggggtttgggaggttcttaccctaggcattaaggcttgggagtacctgcttgttatatcagctgggtcccttccctgcattaaagagcaaaggtacctcaaacagaacagatagagaactgacacaaagtaaaatattcccagatttcctatagaaaaatacagtcacttttctaaaaatgccacaagggtgacggtttggcaggagcatctcttaacaatcagcagaaatctactaaatccctcttaaaaggtccattctaaacaacattccacagtgacacaggggcctgactttgatttctgaataatttgactagaagcaaggaaagtcacaacaacattaagtgcaataactttctaccccctgtttggttcccagtgtgaaatttgctgaaataaaacttgacagcccaaaactcccggggatgtgttccagatgaatcgagtcatccacacaaactcacagacacacgcacacacgccctggaccctcgcacttatagagggagttgtctccatctgtatttgacaacccggtgccatgggtctcaaggctgagggctgcttatggatgcaactttaaatttaatttgcgggggatgataattgtgtggagtggtaggaaaatgctggcgacattttgactttagcagccccactgccctgattaaaaaatatcagctttccatatgcaagacatttctaaggtggacaccttacaaattgttaaggtgcaatttgtgcacagttagttctttgtttaatcgagaaatctgcccgaactctgattgggctgatttctctaaggccgggagtgaaggttatttccttatgccttttgggagcagcaatctctctaatacgtttctgaattattccagcttgtgccgaggttgaacaggagaacaaagccctggttccacagcagaaagactaactgaactcccagctgggaaggtttaggcagagatttataagtacaaacactgaagaaatttgcaagtaattgcatgtatttgctttccgttgtgggatgcagtaaaccagtatttattaaaatgcatcggcgaggtactgtttattaccccctctccttgatgtcttgtagaggggaataaagtgcttggttcttttcatttctttaaattaagggggcaaaacagtatttcaaagaatataaggaagaagctgaaattagacatatactctgaatggctactgcctcttacttaacttggaattggtgcatgaacatggctccagatatgctgttctgatttaatcttgtaaagcttaactttttttctacattcataagtttccatgaatccagtatttggggatcaacaattatcattttctcccatagaatttctgttattattcttggattgccgcctgcaaacctgagtgctaaataggcacatgttcatgggatataaaatgacaggctcagaaagttacagcttaataagagaatgacttaaacaaaccaccaccaaaaagagatattatgttcactggctcctgcatctaaattcctgtgccatcagctactttgggttttaatttgccaatgacaaaaggtcagaagaaaccagacagacgactctctttccctcttcgacttgaatcacacctccccacctgcctcagtgttcccctcttaatgacagacccaaattgttctacgtaatactccttaacacaatggtctcaaactttcgctgcatcagctttgcctaaagagcttgttaacacagattgctgggtcccagcccaagagtttctgattcagtaagacagagaaggtgcacaagaagtgccatttctaacaagttccctggggatgcagatgctgcgtgtcctgggaccacatgttgataaatgctggtctagaaagcaaataggcaaaagtttggtgcagtgaaggtaagcggtacctactgcccctgcccccaaaatagcaaataacagaaacgaaataccaatgtatgttattttagtcaacaattgttaattgcaacctgcttaaatatatggctgacaacattatctccatgtagaattcccaagcccctgccctctcttccacattggtctttgcctacttttccttccatctgatgtcccttaaggatctggatgggtgcaccaaactggggagtgacagcttccagtttgtatgtctgctcttcttagaaatgcaggatcctcatgtccccacctcctccccctccatcaggagtgcacccacctaagcagtaggcacccattgaataccagctgctattgttttaaatcagaataaaaccagagagcagtaacagaagctagtgtgtgcttctctgtccctcagcacagcaactctggttatcttaagttcagcattggtaataaataagccccagatcttaaaattaaaaggtaccaagtagccacaacaagtggaaggtttctgagactggcaacagagatggcagccaatcccctctccccttggcttgagggccattacctcccaggcttccacacctgtaactttaaatcagagaacatgcaaacaagttatctcccaatgtctgtgacatgaagacaaatgaattagagaccctagaggaatattaaaatgaaaaatgctatttgataaaaataagccagaccaggaaatcagatagcatgcttatatatattaatatatgtcatatattatatataatttatattttatatatatgtattttattgaaaaagtcctagctttcacacagtctttccagttataaaaccctcacctcctaatcacataaaatcagattttttatgatttttattagagaagaaccatgaggtctgtaggtataaccacaaattggccagaagtgatattgttggaacaggaaactagactgttctgtgcctcaggtattcaaacttcaatcacttaagagagagaagagcttcataccaatatgggctctcatgacaaagtgcatataggatgtcaatgtctggatccagatgctcgaccctcatacaatcatctgaagcaggtacttggtgtcaggaaggaagctgaggggttaagtgacttacacaagtcagccagcaaagggctgagactagaatcctgtcctttctaattccaaaatcacatctgattttcctccaagaaaccaagtcaccagcacctatcttttctttattaaaagcatgtgcaagtcaagtatattctaaaagataatcagctggtaaaactgaataaggaaaaccagctgtagtaatcccctctgtaccaaatgctgaatcagaaaagacacctagctttctgataatcagattttcctagagcctgaacagggtgaaaagttattgaatgcagaatatttttactagaacacgcaagagtgtcttttagaccttacgatcaaaatgtccaaaaggataaatctgaatattaattacaaaacttgtactacttcaaactttttattatattctacacctctactgttttcttatggttatcacaagtgctaacaaaatattagcattcatatcggtaaaatcaattggcaagtccattatcgacatttatttcaaatgcgtatgtctgaagtatgtgttactcatcccttaaattaacatcttccactttgatgggacaattggacagaccaggccaacacttttttcaccagtaattagtaactctattttcacatttccggagagagaattacactcaaccaacatttctacatcctgaatctgctaatctcagcaataagaccttcctttaaaagacatgcagtgtcttgaccaaagagtaatgatagaaaactaattcacaaacttggtggtttttctagcaaatgagagcagtttcatatttagtaaagtctatatttttgttgacagtacacaccaaaatacatacgcattaaaatgcatacaagggtgtatatatttctatttcctaaaaggaaattcagagatacaaaaacgtaattatacaaattatccttacttcttgttgttaattcagtttaggcacaacacttgagaaataaataaaaattctccatagcataaaataactggtattccatctttacttattggggaaagtactaaattgatgtcatcataaatattcaattttatttttaagtaattaccaaaagtaaagtgtaattcaaagaatggtctgatgtgccacaactagctgtgcaaatgtacaggatctttttaagacggaaaatgtaagtgcttaccaactgggaacttgaagaaattgagattgacatctgacctttaaaagcagtggttctcacacttcattgtttaaaaacttgttaaaaacacagaacctaagatccagttctcaggaattctgattcaggagtctggcacgaagccaagatgctacatggtcacaccaagattcgcaaggttggttctgttactacagtttaaagagtcaccttcagaggcaaggcccctgatgcccaccgagtcatcattctgctttgttcgactctcccaccgcagctgcctctccccactgtcttgtcttgccttccattatttactcactcatgggtggagaggagttacccttaaaatagaccatctcaaaaggtgattttccttttgataactgtcaatcaatgtaaacacaccacaaaacaatcctttgcagaagtttagaagccaaacacatgcttatctgtagaatgtcaggtggcctatatgactatgtctttttccctgactaaactgactacaggagcttagcttgtttctgctgttattttaaagattatttcaaatttgtaaagagtctgacctgcagaaaatgtggacgacacttattgtgggactgtgtaccagttatggtactcgttttaattctaagtgctcctcttcctacagaaccaaaccaacaccggagaagctgagcaaatgcagtcagttggatgtgaattaccttttagttgctgacaacagaaagttaccctgaaccactgaccaagggatgaaaagcgtccgtgtactattagtaattctcagaatcatctctgtccccaaccaagtatggaaagccaagtacagtatcatggaaccaaattcaaatgctggtctcaaagttcccgacttgcttgccttcaagtgccacttgagagattttaaatgacagtgaaatgctttgttcaactaaaaattcaaagtgtcgggacaaagtttatttctgagactcaagagatagtttttgctttagttgttgccattggtgctgctgtgtgtgtgaaaaaagtcagaaataaaatctgccacttttcttttcctagatgatggtatttaaaatagcaagtctaataaaatctagcggtttgatttgctcgctcaaagaatgtatttttaagatgaagtgttccaggtagatgcaagttatgcagatagatatttcataaagacaatgggtcaaaagaactcaacaatcccttctacagccaagctacagcagattttctttcaaaaaagggacacagttgacagagaatagagtgaggaagtggaagctgacaatttagtgctaacggtattgctcgcacaatagcaaaaacacaacaagagtcagcaaagggtgctgcatgcttacagtcctcacgctaacaagtatttgtaagtaccaacaacttggagaggtaaggggaaagaaaagcctgccatggtgccttgtacaggtggcgccaaggtccctgtctgggcccttggacaaaaccatctcatgtaaaccttaaagaggattaatcctcaaggagcactgtaatgagaccttaaaaggctgaacaacagcagcagaccacggaggaaggcagtcatctgctcccccaagtcttgctagcagagttacatcaaagcaaacgggcagcagatagcaggcttccacggcaatcccttatctcggctccagcggacaccactactgtgattgtcttgaactgccacctgtcccaggcatctttgaaggcaacgctaagcctctgatggatctgacctccttgagctgagatccttttatgtctttcttcattttctgccctgcgacattcttcccctgccatgcacacgacatgaaacaaagggagttctcactcctgactcactgtccccagccatttgagagcaaagaaaaacaatgttcaggattatactctgcccataatacagagctgtcctcaggagacaagcctcttatttttgagggtataactatagacggcatttacgtgcaaactctgtacaatggggttcgatggagctgggcgccaagataggaaagctgcatgtctgagataactcaaaaacacaaggaatgatcatacagaactcgattaataaaatcacatattttcacaggaggaatacaaatataaatactgaaatattaaaacttacttacaaaatcactgcacattggggcttgaaaaaacagcagcacacaaatatccttaaacctggttcaacttaaaaggaatttttttaaaaaaatgagagagaaaaatatttaaaacacacatatactgcaggtgagaaaagtttgaaacctgaatggtaaaacagttccctctgagacctttctaagaggctagaggtactgacttttccaaatcataccaggagaaagggtagtgcctgtgtttctctgaaaagttctgacatttgaggagaaggaaaactgctgtgatcaaattcattcaacacaagacttctcaacatccacttattctgtcacacaagtctgtctgcacacattgctttaacaacgctcacctatatgactatttctcatactgagtgaaattgtaacatgcctcagcaagtgatctagagtggtatgattttaatactttgcctcatttcattaaagatttcagccagcatacaagaattcacaaggtagaaaatgctaactaaagaaaaatctgatcagagaacagtttagatgatcaagacctagagaaagttaagagagaatatgcaggccgcaatccaatagagttggaataactgagcagctaataatctgagtttcctggaaacaacaatctgagtttcctggtaagcaatgagtaaaggaaaccaaaatcagccatatgatatatcctgcaagaagtcacataaccacactatcttatatcatggtcttgtgttttatctgcacagtatttaaaattttcagaaaagtatacacctcacttgacatagaccagcaattctatagctaccatgacaacattcttctactctgggctttggtctgggttccaaaacccacttattagaagagggtcagcctaaagggctgggaagctgtggccttcctgtttctggattacagggctgtctccagcccaaaagagtgagaaccccagagaaaaacccaatgacgagcgtcagtccacagccagcccctgaaccatctacactttacactcccacactcgatatggcctcctcaactctggggctattccagctctttcagtttggatttttttagctttcagtttttcaccagctttcaaccacacagtcttgttctctgaatgacagcctatcttcccacttctgacatggctcttgattgcaggcactccttctggtaacaagcctttttaacttcggccagagaggcccagcagtaagcggacctcagagctgatcccaggcttgcagtagacaaactgcctcatgctcttctatccaagctgggataaagatgtttttctctgacaccacagcccattacacatttttcagagatgcatgatttgaaaaagaaacacactgacatgtacttcatgtgaggtgggcagcatgtatttgaagctcataaatctacccacttccctcttctcaatgagatctgacttgcaaaactgtttgcagactgtggtgcctttaaacagcacacatgcatccccatgattcactatgcccatttcttagacagggccagtttctatgagggaatagcctatttcaatacagtgccaacttaaaatatttaaactccagtagtgtttgggacagactgaaaataacttttccaattttaaagcaacctaagttttacagcgtatttttatttctccaagttcatgatttttaaacaatgcagtaggcattaaaatgaaccatgttaagaaacaaatgtagggcctggtgcagtggctgtcgcctgtaatcccagcactttgggaggccaaggcagcagattgcttgagctcaggggttagagaccagcctgggcaacatggcaaaactctatctctataaaaaaaatacaaaattattagccaggtgtggtggcacatgcctgtggtcccagctactcaggaggctgaggcaggaggattgcttgaacccaggaggcaggaggcggaagttgcagtgagccatgatcgagccaccacactccagcctgggcgacagagcaagaccctgactcaaaaaaaaaaaaaagaaaaagaaaaaaggaaggaaacaaatttaaaacagggtgccaatcaagtatcttcaaatagacttaatatgcaataaaaaaataaaatcaaagaaaatatacatatataggaagatgtttggagaaaaacttacctgagtagccagtctgtaataagggagcactcaatttaagacacagtttgacagcatcacccactttaattgtctgttatggtattagccagaattcaattatttgatttaaatttctatcaacctatcatgtatttctattgaatactaccagttggatatggttgttactgtttttaatccatttggttaaaaaaaaataaaaagtgacatttttctcaggaaatgaaagactagctcttccagtagcaagaagtaagattttcaaaagactttttggcttttggatcactgtctttggaaagctgcctctttaatctttgtaagtaattctataaaatatgatacatgcctagtttttaggtagaagtttagaattaaattcatttattttcaggcttctcaaatttgtaaaatcataaggagaataaaatacatcttaaaaactaaaagtaagaaagttataaagaaggattcagcagcatcagaagagatcttaaatgtgcagagggaaaaactgtcagtcagacagcccatgagccgtccttggtatgtcagtattttttttttagggtgagaaccaagacatcagagaggtgatggtaggaatggaagtccatgggtcttaacaaattatctcccttaattcctgttatcaccctgtgcggctgccatttccactcccattttagagatgaggaagccagtccagtatctaagaacttgctcaaggtcacactgccagaaggtggcagaggtgggcctgggtcttaagtttaactgacactattgcagtctagcagaaatgcaacatatttaatccatcatttccagttcaagatagcaggctgggcaaacatatttctcacctgtccctccaaagacttctgtgaaatgaaaaactggaagtaagttttgtagtaatgataaaataacagtaccaaagaataaaatttaccaggcccttactctgtgctaggcacttctaagagctttatttatattaagtaatttaatcctcaaaacgaacccatgatgtcagagctactcccggccccactgtatatatgagaaaatgggggctcagaaaggctaagtaatttgcccataatcacattgttaggagtggcagaattaggatttgaactgaggcagtctgggtctatgggtgaaactcttaacacagtcaaagaaatacataaaattaagataaaaaatttcaacccatttctgcaagatgcatagtgggtaagactggaattataggtggacatggtgcgtagagaagcagcagcctgaaatattcttcaagagggcaaagaaacaggtggcagctgattcacctaagaagccatgggctgggttgggcgcggtggctcacgcctgtaatcccagcactttgggaggccgaggcggggggatcacgaggtcaggagtacaagaccagcctggccaagatggtgaaaccccgtctctaccaaaaatacaaaaaaattagctgggtgaggtggcgggcgcctgtaatctcagccactagggaggctgaggcagagaactgcttgaacccgggaggcggagcttgcattgagccgagatcgcgccactgcactccagcctgggcgacagaccgagactccatctaaaaaacaaaaaagaaaaaagccctgggctgggcagatcttttaccggacacacccgtgacagtcagatggcctgtctcctgcccacagcacatgagcacaggtagctggcatttctccagataaaaattttatgactctttttcaaaaaacagaatgaactttcctgggaaagtgaaggcttcagcgtggattttgaagccctgtttccacccaggtctatcacacaaatgcactcaccacaagagtcacaccagctctaacttctagtgttggtcccagcaagttggtgtgacacccttattggtacccaagccataccggttcttatagctccccagaatcaagccctcttcgttctggcatgtggagaagctccaccctatttccctaaaggaaatcctgccaactgatacacgtggtcaggatgttccatccatccatccaagtttccatatgccaagcagaacaacattaggccagctatccttctccacggttttggggaatgacacccaaggatcactaggttttatgaggagaaaaaaggacaggaatgagaatgaccaatatcaacaagaaaaactaaccttggaagaaacttttagaaggttttagaaagcattacatacaaaaggcaagagcaagatgttaagaagaagtttcaataaaagatttcttaaagttcttagaaattaagattatgactgcaaaaagttaaaaataatgtggagcaatgaaaaatgaagtcaaggaaatttcccagagcacagaaccaaaagcaaagacatacaggatatcagagaaaagagaagagacacacagaagtaacctaggaggtctaacagtcaactatgtagaattttgggaagaaagaaaagagaaaacacagcagataaaattattaaagatagaatagaaatcatccatagagttaacgaatgaatcttcagattcaaatggtccatgaagggatgggcagaattaatgaaaataaaaattaaattaaaacacatctaggtacatactttcaaaccactaaggataaaaagatcccaaaagtttccaggaaggaaaaaaataagccatctacaaaggaatacaaatcaaagagacatcagacttctcatctacaactttggatggtaatagaaaatgtagtgatgccttaaaagatcttgtagggaagccttttaagttagaattctaactacaccatcaggaaagagcaagggcagaataaagagaatttcacagacacaaagactcagaaattctgcctccactgttgttgggaagttacttgatgtattccaataaaataaaggaataaattaggaatggcaaagttgaagtcgtaagacctaggaaacagtggttccaatccagaagatcacaaagggatgtctagagattcctcgttcagacttctcaggagaatgaattggccaggaaagaagggagctttcccttaagtgcaaaagatatggttgggaggttggggagtggggggatgtaagactattgtaaagacaaataatagggaaaaaactaaatcaactaccaaaaagcaacatgataggtaggaaagcaattaaagagtaagtgtagataaagcacttgttcgtaatgctagacacatcgccattgggtgatttaagaatttagaaactggactaacacagaaggttaggtatgatcttaacattctactggttcaacacagagaatttccacaaccataatgctgtagatgctttctagatcttcaactttaaaaatcaatctatggacaaaaacatagcagatgtggttatgatagtaagaccccacaaacatattaacaaccctgacactataatagaaaagctggctccagaagatgagatgtggatggcacaggggacctaacatcttactcgttttgctatgaaaagctgatgaggaaaagaaagagaagcttacaacactctttaaagttataaaagcacccaatatacaagtaataatataatatcaatattgaaagaagagggcagagtattaaaaattaaagattaactttctcatttcaaagtcaatatattgcataagaaatatctagagttgacatgtcaggatataaaaatataagcacattctggagttgtaatgattgtttaccaaaagaactaaaacaaaaacagtgacaagtgcccctgggactagggttggagaaggaaggatggaccactgtggctttccattccagggtcttcaggacttcattatttatttatttatttatttattcatttatttatttatttttgagatggaggctcgctctgtcgcccaggctggagtgcagtggttcaatctcggctcactgcaagctccgcctcctgggttcacgccattctcctgcctcagcctcccgagtagctgggactacaggcgcccgccactacgcccggctaattttttgtatttttagtagagatggggtttcaccatgttagccaggatggtctcgatctcctgacctcctgatccgcccgccttgacctcccaaagtgctgggattacaggcgtgagccaccgcgcccggccggcttcatgatttattaaaatgagcatgtgttaacttgtacatgataattgtcatcaaatatggtaaaaaatgttaaattataaagagagcttcaaggtttctttcttgctggatctttcctagaaaaacaacaaactaatattggaataatcaaatagtcatcgcatatagaaaaaaaaagtttggctttttcaaatccatttcaaggagaaaactttgcttctacctggcttggcatcccaattttggaatattactctgaggaagaattctagtaacatctctttataacctctcagtggattacaggcttacagcctcacaattgtcattcaattctgggatcctcagaaaattagccccaattgttcaaccaaatctgacaccactgatcagaaatgagccaacatgagcaggttgattttgtaaagcatttagcagagcatcatcttaggaaacattaaactgagactggaaaaaagaccctaaaaggtatttaaacataaaatgagctcaaaaaaaaaaacacaagtaatcttcacctaccaccctatcaataatcatttgcttcaaatctttgcacatcaccatattccattgttactaacaccataatcctctgcaccaaaaccctctcctacaatttcagaacaccaaaaggccttcaatattaattcctaaaagaaatacttttttttagaaattaactttgaagaatggaatttgtttaataaaagtaaaacttatacaaaaacattctctcatatcatcagcttacttaagtgaaaagaaaacaaacttatgactccttagaacaactctgtttctactttggctcttggcaaaactaggttggcattcaaatgaaacaaggaactctgaaataaatcagtattttaccttggtctcagatatcattagctaaatgaggacaagtaaacgacagaacacactcaagcattagtgttgccgatgcctccaagttcatttacttccaaaacccagacaatgcagcctgtggagcttctcaaccagtcagactccaggcctcactcctaattgcaccgagttccctccaaacactgggatcaggaaattcacagaacaggagggctgacactacatcatcaccccactgaatcctgactcttttcaggagtggggccaatcacagctttcctatcaagctctgcataatagagtttctaattagaatcttaatactctggatagaaagcagcagaaaaaaaaaaaaaaactgtgccttagagtcttgctcacctggtggctcattatgagagaaacacttcagaaaatctgaagattaatagcaggagtgtggcatcaaaggaacaagactgcaccattaccaaaaggaaaaaaaaattaagaacatcctagctgggcgtggtggctcctgcctataatcctagcactttgggaggcccaggcaggcagatcacctgaggtcaggagttcgagactagcctgagcaatatggtgaaacaccgtatctactataaatacaaaaattagccggcgtggtgtcgcgtgcccataatcccatctacttgggaggctgaggcaaaagaattggttgaacttgggaggtggaggttgcagtgagccgagattgtgccactgcactccagcctgggcaacagagcgagactctgtctcaaaaaaaaaaaaaaagaaaaaaaaatcctattggcatacatttccaaaaaggaactctaaggtgggtctcaaaagtcttttgtcctggcagtggggtaggtagtccccagggatgacatctcaagtaggctatttcacacacagtccagcagtctgatgtctgcgctcccagacataagaatacatggtcaccaatgcgaaatattaacttcaaataactatgcatgagaaggactcgtgtatgagaaacatctagcgttaacgaccaaaagctgaacgattcatgtcctagaatcagttccctgttactataaacccatgagaagacacagaagaaaggaaaagggcactttccgtagccgctatggtaaacaaaacatgccaaatgcaacttttaactaccctagctcagagggcaaacccacaaaaacccagaaaatttattacttctgagtttattagattttggggacaggaactatgtgctaaattaggcatgctgtgggctctcaggtttgataaatcaggtatgaggcagaatgaaatcaacactgacaaagactagctgcgcaccaccctcagaatatgacagcacgtgccaacatcactgaagggccttgaaaggtcattagacaataaactatgtgcttggctgaaatattagcaagggtcaggatgagctcacgtgaaattttccctgcaagaaaactctaaaattcaggggagcatttcagattgcagttcacaactcctcataaattaatgaaagtcaggcattaaacttaataaaagctggaacggatcaagcagaaagaaaacgcagcatcggcatatgtgttatgtgaatttctcagagtccataaatttgatatttggaaggaagaagggaaatgttaattaggagaatttcatagtgtatttaaatttgccatggagtcaaagctctattgtaaaaacccccttggaatctgaaatcaccgtcaccagatctaggtcctgccttttatcttgctattttacacttgttgatatgcaacttaattgtttcatgtgttgtttcttattttctctccccaaattataaaatctagaacgctaaggtcatgtcttttattctactgtgtgtggagctcaattaatgttggggaaccagtaaaaaaatctaaaaattcatccctctgacttctctaaaagccttgtagcaatttttcatgatctttagactattctagctagctatatctcagagtattatagtcactcttaaaagtctcaatgttgccttttcttattttcctgatgtagcaggagagcattgccacaacatgtatctttatctcacagaccagatatatctcaggtcaaatcaagtcccctgaaacattactttatacagatccaggcagatatctcatatttgtctttaaagcaagtatcagtcctacttgcaggtcccagagacaggaagggatcccagtggtcttcttcttactgttttcacagattttctactcagagctctctgtgtcagtcttggccttccttagcatatatttctttaagttattggttgagaatttccatgtctgtctttagcctgcacgggccctgctatctatactcagtccttttgatcttttctcataaatcattcctccaacctcttcatcatgcttaagattcttttagtttatctgagacaccaaagtcaggagacatgaactgtccatattagcgggactgttggataccaagatgcctttgtggaaaaaaactgttttctctctgtctctctctctcactttttttctctttctctccccctgccacatgtaagcattaagtatatttataaacaaaggggatactgtcttcccaccacctcctcccctgggtggggcagggtggtttgcagccctgtgtagaaccacatatagagacagttaaggatcttacagtggactctgtatggctggtagagctggtccccaaaaatgcctaggtagggccagatactggcttgtattatctgttgacatgtgaaagctccagttattatacaaactgttcttgagaactgagatttcacataatgaattaagatctttgatccaaagagacagcccatcttccaaaagccactgcaccattaacgaagcagatgtgggggcaacaggagcaccatgagaaggacaacgttttataagacagctagaaaaggaatgcacgtaggcctccgtttctcagttacaaagccgaggtctggagtccagactcaaaccagcaccatgagcaggctgtataatctccataattataattcaagtgctaaatgagtttgtgtgaaaactaaagaagatcacataatgaggtcctcagcccagtgcttggcacatgggaaatatcacacatatggcctgtggtggtgattactactgtgtaccaactcttacatcctccaaaacatgggggtacagagaggaccacaggcttccccatttttaacttctaggtaaggtaatgttaagttctttgcaaaatatcagttaacaaaataagaagaaatgtctcattctcccctacaacccaacacctggagcacggggagggcagaggtagcaaggaccagttcctgcctctctgacactgggatgcataagaacaaagcctggacaccgaagtggcatttggcctgccttccctgattctacacccttgtactccaagcccctgcccaaaactggcaatgccaccacctgggttccaggacatagtttccaagcactccccagctgggctgatcccaaaccactggcaacctagccacgctcttgcacagatctggactatcattttgaaatctcatccgttatgggacatgggtgaagaatctgagttctggagccaataaaccgggttcaaacctcagttcagccacttccaaaccacgtaaaaatggacaacttacttagctttaccaggtctcagtttcctcatatgtcaaaggggaaaatcatgacaaccgctcataaggttgttttgtggggatttagtgacttcaagagcaaagcccatggcataacattgtggtgcagacagagagcttactttctgctggctatcatttcagcaaggatcatttcccacctgggccactgcaacagcagcctgctaagtcacctccctgattccacattccatgccttcacaaacgtcactgcacaccagccagagtgacagccctaaaataaaaatcaaatcacaacacttcttccactggctttttgttggcccacaaggtccctcaatctcatctccccctactgtcccaacccctggccaatgaccacattggcatgctctccgctcctggtactttttcacggcaaacctttcagtagaatgctctccctcagatctcccagggcagcttctctttttttattcagttattctggctgcaaagacacctcctgagcaaggctttccctgccccacccacctgacctaaggcacaacattcctacccaagtctctctctagcacatcacctggtttattaccctcagagcaccaccagctataggttgagtatccctaatctgaaaatctgaaatgctccaaaatccaaaactctgagagctgagatgatgccacaggtgaaaaattccacacctgaccgacctcatgtgatgggtcatagtcaaaatgcagctaaaattgtttcatgcataaaattgttttaaaatactacataaaatcgccttaagactgtgtggaaaaggtatatataaaacataaatgaattgtttgtgtagacttggatttcatctccaagatatctcattctatatatgcaaatattcagaatctgaaatctaaaacacttctagtcctaagcatttcagataaggggtactcaacctgtatcttcttgttaaggctctgcctaggtgtttgttgtatgtctcttctggctggtatgtcagctttgagaacaagaacctgatttgttttggcaaacgctgacccctcaggacctagaatagtgtctgactcacagcaggctctcaaaacactgcacaaagttttttaatgaaaataaatatcatgcatcatgtacttaatggagtgagactcgaggcaggtcacgtcagcagtgttatcagaaggactgagtcccccagaggcactcaggtgtctccaattgttcactatctcccacatcatcgatctgtggcaatgtgataaacacatactgcatttaaaacatcattcatcataaaagatagaggctacataaaaatgcatctcacagacctatatatgagaggtaaactgcacatttgatcaaaaggtcaacccacttggtcaggttcactgagccaagctgggatcacagacaccaagttggagtggatcacagattctctagcagggagcgaggtcacaggaaagctaccattgtatgttagtttcccttcacccctgggggaggagggaataaatttcttacaaagaggagacacaggggtaggggaagggaaaggaaatgtgaaatcttgccccatttgaaaacaggcttattccacgaaagcaaaccagaagaagagctggcatttgcttctcagcatcccccacgtgcacttctctgctcttgtctaaattacctaggaaacaggcacctccttttactccactcacaagacaggagcacaatcaggatgcagatctgggtccccccagtggacgacgtaaacaccccgcttcctagagtgggctccctttgatcctcacaatgtccactgattaggcctgcggctccctagggagcatggcacaagtctcctccggggtcccatcctctcccctgagactctttcagtcctggctggattgcaggctcatccactaatgccagtctttgttctcatgctcccctggtggtgttagctactaaatttcccagctgaatttcacttggttatttctgggccctatctccaacctcagcctggccctgctgcacaatttctctagcttgactgatgtgagagcatttgggagttttccaataaaataaaactcaatgcttttttttttcattttgaacactgtaagtggaaattaaaatgtgccttgatacagaacactgttaattctttaggaacgaagccacagttatttcctatgttttttatttgtactttgtgatcaagatattgtggtgattggggttacctattacagagcagctcagcagttgagaacaagtaaaaataaattgtgttgtcttgaagaaaaaatatgacctgctggctgggcatggtggctcacgcctgtaatcccagcactttgggaggccgagacgggcagatcacttgaggttaggagttcaagactagcctggacaacatggtgaaactccatctctactaaaaatacaaaattagcgtggcatggtggcacatgcctgtaatcccagctactcaggaggctgaggcaagagaatcacttgaacccgggaagcagaggttgcggtgagccgagatcacaccattgcactccagcctgggcaacaagagcgaaactccatctcaaaaaaatatatatatgacctgctacacaaaggaatgcagcagcacatccttaaagaccaatgagacagcagcccagccagggacgcctgggaggggagccctgtgacctgcgatggagtcgcacgctgtcaaattgaaagcaggggtgaattcaattctgcaatggagaaattctgggtaagtgattgggaacccaaaggtctgtttaaatatacaaagggccatggaacaagtcttagtaatcaccccagactcttgcaggagagaaacaaacagctcctcacagaagcctgctggcctggacctcttgagccctgtctttgccacttccctcctgaaattcaccctccaaccacaaagattcttctcaagtcctgcagatgtcagttcttcctttggcttccaggccttgacaaatgctcctttttgcctagattactctttcctcacctctttcagatatcacctcctccgggaggccttctggactgccaaggctgggtaagtccctcacctgctcccaaaggactcctcactctctctcccctgacagctcccttgtattgacttttcgatggcctaaagctcaacagaagcaggcacttgctcattttgttcaacactgtttagcacttaggtgacactcaataagcaaatgctcaattaatacatgactgacagaatgaacacaaaaataaatagctaaaggaatcaaatggaatcttgctttattttgatctaagaagaagaaactcattgaaaaactgaggttaatgaaaagcctggcccccctcaaaagaagtgaagacattagaatgatgagaacagtccattgtaggatagacccaaatttaatagcttaaagaattgaggaagttggatccttttcaaagcgtacaacaagaatccaaactatatcagaagacagggagaagagagcaataaaatgccagatcggttactctaaattaacccaaactgtgaacagcacacagagaaaaatcaagccctttccctaagaactatgaagatacagcacaaatttacaggtatgagatcaagaaagctaaggcaggatgggagattgcagcttcaagagacatcaaaggtaacattctttaattatacaagaaaaaggaggagggccgaggataatgttgcctctattaagaaagcgggagggaaagctgttagcagatggctatgaaatggcaagagttgctgtttctcatgctttactctaggagggaaggaaggaaggaaacagggagggaaaggacggagggaaagaaatcacaagcaactactaaaaaagtgccatttgggtgggtgccaaattagaaaagataaataattacatggaatctttaagcaactggattcatgatcctgaactgagttgcagatggggcctcccatcaacatggatcagacgcatacttggatgctaagttgggaagatgttaccaaaatatgaattgcctagaggctgttgaagacaagatacatcactgaaatttggaaaaaggcaaacaaacatcatgctccccttaaccacagggaaaatacctacttgttcgatgccagatgggtgtcatggaagagaggcagctctcctgtgttaatcttacagtacttaaaattacggtccccatccaagtctatgagtgaaatgccagcttattccaaagaatcgaagtccctgccttatgccagtgaggtggctcaagcctgtaatcctagcactttgggaggcttaggcggacggatcacctgaggtcaggagttcaagaccagcgtggccaacatggcgaaaccccgtgtctactaaaaatataaaaattagccaggcgaggtggcacatgtctgtaatcccagctgcttgggaggtagaggcaggagaatgggttgaacctgggaggcggaggttgcggtgagccaagatcgcaccactgcactccagcctgggtgacaaagcaagactccgcctcaaaaataaaaaataaaaaaatgcagattttacaaatgtacaaatgtaccataaatactttgtacattgcctgctctcaggaaggattaggtgactaagtttggatcagaggttgtgtacaataactaaattgtagaagggaagcagaaacagcaatgtctcttcaggtggtcaagaagccactctgatgggcaggctgtgagcatgggtcacctggaattccacctccatggtgactgtgataagcatctgagcagctcccaacttctctgccctatggtggcacgcatgagtccccagtcctaccctaggagttttggtgcccacagaaagtaagtactgcctcggactaatcacattattccaaaggaggtcgggccaccaggtaggggcaacacaaggaagtagctgtgatgtgtttaaaggtgagaatgacatgactactcaagtgtccacggtaggaaaatatccttgtaagatggctcttagagactttccaaggaggtgggttgttagataggcctttaaacataagcaggatttgaaggcaaagagaaagcaagtaactggtccaggagaaacaactatacaagcagggcaacaagggcagggccagcaccagagcagtggccaatgggagctgagtcgttgtagaagagaacagtgccaggcggcaggggaagagaggactggaccagtgcactaaggggctaagtgattttctctagaaaaatgcggtctctcttggtcttttctttctcttcctgacctgggtggtcttcaagcttctcccagtctcctttaataaatttatcctcaaaattgatgaataaaattgttaacaaatttttctaaatgctacagggacttttctcactgttggttcccagtttcattcactatctcctaaaacagagatacgcagactcacggtcgcatcaggcacaagagtagtcaagattcactggcaacagttcaaatctggaacactaagaattatccctaaatctgtattgctttgctccaagttgtcttgcaatgcagctctttaaaagtctatggatcctggctaacatggtgaaaccccgtctctactaaaaaatacaaaaaaaaaaaaaattagccgggtgtggtggcaggtgcctgtagtcccagctactcgggaggctgaggcaggagaatgacatgaacccgggaggcggagcttgcagtgagccgagattgcgccactgcacagcctgggcgagagcaagactctgtctccaaaaaaaaaaaaaaaaaaaaaaggctatgtaagtggctcactgtttctagtcttaaaacattacctctggattactaaaagaaagccaggtcattctattgaatttctaagagaaagacaagaataagcagggagctattctcaagctcacaaataatagttttgcaaaggtttatggacttgtttggatctcctcactccagctcttactgcaattcaagactaacagcctaggaagcaagagacctagcaaagcccccagggtgtgacccaacatcagtctttctggttaaacaatctaattttcaaagggcggaaaaaaacaaagcatttctgattggctcatcaactgttctccaaagatgtaaaagacagtctggatgagaagagaactaagagctcagggaactgtcactgcctttgcagtttggtcaagacaaaactgttcatttatgcctcttaggcatttttgtctctcacagtctcaagatgacacttggatagtaagagagagaagtatgagcaagtgtacctattaaatatgtaaaatatacatcctctcttccattcactcagaagatgtatttctaaagggatgtggaaagtcacctaatataaagacagacaggtagaaaaaaaatctatgcagttttttagcacacaagaatgcaagtgggcttagcacaacagccttccacagaaaataaatgcaagccaattaaaaattcagggttttttctttaagctaattcctcaggttttgctaattagcaaccaatagttctgtcatctgagctggggaacataggaagaataccagtggtatgttttcaatcaaagcatttgcatggaagaatgaatcatattttccatgaagaactactgcttaggagcagttgggggcagaagaaaagcagccttcacacaactataaaactgtaaaggagacctgaaattttttaaaaagcaggcatctttctgctccctttaccaaagccagcagagaccctataatatgacatgactagtgaatccgagaaactttgcacaaagatccctgcaggaagagtttaaaaactagactcttgacagtaagacagaagacaatgcaacacatgttttctgtaaaagggaagcgaataaaagttaagtgtcggccagggtacaggaatgctttaactattatgtcacctgcctttgaaagtttatagaagataaatgcatggcagtcaatgaaagcagggagagatggcggttagaaatacctggctacagacagagcatgggcagaagaaaattgctgaggaatctttgggcagaggatggggcttcttaccctgactctgatacaagatcaggtcctccaatctaacccctaccacgctcccccaaattataaagcgccagtgatcctgtagctgaaagcctgtcaacaccacgccatgtctgagtcatgcatctaaaacgtctacttttgcgccttgatatacagcccgtccactgcgacccttcatgagagaatacccccgtatccccccgggagattttattctaaacatatgctgtgaatgtttgaagtgcccgctgtccctgagttttcttttttcttttttttttaagccacaaaacctaaaatactttgatttttgcctaactacaatttctgaagatgcaacattgcatacccaaatataataaaatcttgtgcaataaaaattttacagatgtccttctgaaggggaaaaaaaaacaaaaatggttttcccttttccggtcttacaggaagcctgcccacactttagaaatacaaagttcatatatatagaaacacaaattaggcatcttggagagtctacaatttccaaccacagagaaatgaaggaattgctgtgagtgttcacatggccagcccactggattagaggagtcttttcttttgaccggctcagcagagctagcaaataactcaagggcaaggggactggcctaaaaagatgtttctgaacttgagctactgaaggtctgcaatgcgcttgtattgttgacagggcccacgactgagacaagctatgcccacaagataaacaaatgtgaccaaaactgtatgtctcattttaaaaagagggcatttcttcatacactaaaaaattcatggaaaatttatcaccttcaattcacatcaatcattagctttgcctggataattaaatccatgtgagcagatagattttattataaagtatctcaaaaaatacttgtgatactggcaggagattaagtaatccaacagagttctaaagaaaaagtaaagtcatatcccatatgatgctgaggcttagtttaggatgtctttaaatattcaatatgaataaataatactatatcttttatgttcctgcatgtattaaagtttgcatttgttacataaaacactttctgctaagaatttaaaatgttaacacttctcaaactcatttaaaatctttacaatttcttcacttacaaaacagaaaaaagttatagtcgatctactgaggttgactgagaaaagattatgttcagaaggccacagtgcacagctctaacgacaccacagttacaggtttgcagtttgctcaattcttaatctgtgttatagaagaaactggtctcaggcaagcaggtgaccaggtctggcaagaaagaaagaaaaaaaaaaaaaacagtctacactgaatcaaatacaagtgcaaccctcacaaacatgacttagagagtcaacttatcacatattgatgatgatgaggaggaggaggatgatgatgtagaagagaaggaaaaaaagaggaggagaaggaggaagagaaagcagagaagaactaccttaatacatttgaggcacttaacatgtgccagagattttagttaatactttatttgcattgtctcaatttccacaagaacaccatggagcaggcagtcatattatcaccctatcccacagtgaggaaaggattcctagagggatcagcacacttgtcaaggtcacacagctagcaagtgacaaagctggaccttgaacccaaattcccaagtgttgagccaatctgtgcagtctttaggacttcccatccatattatctatataataatgtaatttatgaccaatttagggagtacattgggatggtaggtcaaaattgtatttgccatttggttacagagaacttatacagtttataagttatcacataattttaacactgatttggacaatattgtgggagaatgtaacgaataatccactatgaatgctgtaacctcaaaacagagtgatgatgaatgaattcagatccccctaagagctctcccgtgcccatcattagttaataggacattggaggtccaggagatgggtcccacttgcaccgctgaaggaagacaagggtcccaggtgtagagagctcccagcccctcagaggacgggaagattcaatgggggaaaccgttaaaacaaacgaaccaagaacaagctgcaagttgaatggcacagagagaaagttaacggttatctgctcactactgtcagccaaaaaagaagtactcttcagctgtcctgactaattaaatacctcactaattagtgggcatcttgaaaagacaacaaaacataaatatgagatgggaaaagtttgtgttcacacataagaacaaaaacaatgcagggagctttggctaagagtctagcctgaatttttcttaaaaagtaagtctactactggggtctataaatacaggtagaaagcatgtaggagtccctcacattttctgcatggatgatgtttaaaagagactcacaaataaaaatacaatgcagaaaacttaggaatgtgctcagagaaaaagcctaccaaggctattttaaaccttcattactaaaaggaaagatgaataaaataaaactaagtaaaccctgaatgaaggaaggaacaagcccaatagccttcctccttatttctgtatctgcagaaataagatggacaagcacttttgaaacagagaagttgtaacctttttcaaaagcttagaagaatccagaaaactaccctccgtgcttctgaccactttttaaaaaatgctctctccacttaaaaaaaataatgtagcttccatcttttccaacaatataatctggttgggggggaggtggtgcggggtagcggttgctgagacttaaggttatgcgaggccctttgatctgaggagtgagcattcccctttgctgcaagccaactaatgaagggatgaaattagcttttatcctgggcactttcttgagcaaaaaaacatgcactaatcagctgtcctcactaatcagtcatctggctaatgaccttttgccttaaaacactaaaatttctgaatgatgtggaaaaggggaaacacaaaccagtccccctcactggagctcaatggatcatctggaattggagccgggaaggttaaatggcaagtctgaatcctggcaaggtgataaatctgtaatcaagagctgcaagctttggcacctcaatatgaacttcattactccacaaccaaattgtatttttttaactagaaacaggtcagaaataaactcaacccttatacatttttctttatattctgccgttggagaaaaccatcccatacatgagttcagagtcctagttaatttcttaaacgtgattagtgctgagaaaggagcttctgatgtgtctggcacgctggttagagaggaaaatacagcacaaaggaaaatcttccattttaaggaatttagcacagatttgttaaaagaggtttgtttttacaaaccatcaaaaatgggaataggcaaaatcattacattaaaaaatcattaaaaatgggaattgcggctgttgagcacttctcttaatgcagcctgctttcataacttcataacaacaaatttttctcctgcagcatctgtttggatggagtaactctagttctacttctcaacaaaagtctcatgtggattagtcacaaatggaccactctcctgaaggccgccccactgaagactgatgttgcttagagacgtaagaaaacatctctctctaaaaagaatgggaaagaagtagggaaagtaagaaggaaagtggaaagaaaattacaccttttaataaattatacaagccaaaacttcataaagcgcgcacacacacacacacacacacacacacacacacacacacacagccctccccatagctcctgaacaagtgccgactggcatgggcacttacggtagtggggctccatgtaaccattcctggggtccatggcaaacaccgtcccgcggtacggcacagagggctccgccacgtgtggcagggacccatggatctctttcttgatcaatgaggccctctcgtcactcgatgttgaaggttcctcactgactttgctgagcccctggacattctgtggctgcatagtgattgcgtttcttctctctctgtgataagtctgtccaggactttcatcctctaaagaaagaagaaaaatgaaagactctgtaaactactttaaggagcaattaaaaaaccatgatcaattaggtctcattctcgatatccctctcccggaaaagaagtatctttctcattcacagcaactttgagagctacagggctgggatgggatctttgcagacaaaattgtttatgaatgagggtccaaagtacacaaatacacagggaaggatgaaggagagcaggaaatgagcctattaaactgagatgtaggggttggcaaattggcatcaccagcttctagatgggtctgcccatgaggtttctgctcatgggctggccaacatcttgcaggtcccacgtggaactgaaacctttgccaatctaagactgtgcatgtccagcttccctttgcctgcctggggacgcggggcctccggggtgacacaaagtccttccagctacccactgaggctctggttgctccaggggatgtagggcctttgctcctagagaatgacctattaggaagctatccaaaagtttatgctgttttgttgttttaagtcagatttgtaacccagcaagagatttgacagagccaaaaatggaacagaaaactcattggtgaaaagggataaaggtgccaatcatgaaaacctacagagcctctcgtgagatacttcctgcttctgtccatacaacaaagctgagacctaagaggaacacagagtgagactgaaagtccaggtgtgagatggctctgagggtgaggaaggaaggtgtgggggatgttgatatgtgtccatgctctgatgggtccatacatttcttcaaacatgtaagaaacagcttgaagaaattccatatacagcgggtattccagtttcctaatacttcagttcccttcgatcagtaagaactttccatttctccactatggttctctgcaaatgtgattggatgacctttctataatagcagatcaaagaacccatgcataaaattaaatcacactgcctatgtgaacccacaacaagtggaccaattcatctctttgaatcatacatgaactctaaactacatgctcctaaacaagttccacatttaatcaacagactgtgctctggcagataagtgctgatggaaagaaagctgctgtccaggtaccacttagacatctaatgtaaaaaccgtttcctattcctatcttaaaaaaaaactgtatttgggtataaataataatattgttgtgcattttagataaatagatcttgagcacatcttattctcatatacaaatttatcttcaaaataatccataaagcagatatgattaactaagggctcccccaataaacataagaataatgctttagcagtttcataactttgttcaaattcagaagaaagtagaactgtaaacacagacttgcataaaaatacaaaccgaaaataacaaatactatttatgttgactcaggacttgaactacctaaagccagcagcaagtttagtctttctgcctgtgtgtaggacttgaaaactaagcaatatattccttaccttagcaaatgacttgcagaacagaaaagacaatgaggtatattttggtctttacagagaatttgctgactactacaaggtaactgtgaaatattattttaataatgttttgtgcagatcctcatcccaaactttataattaaggggtaaattatatgtttaatctatcaagtaaaaacaaaaacaaaaaaaatcctgtaatctcacatgttcacattgatctctatgaaagcaattcataccatgctccttgcaattttaaaacaaactacaaaagacaaaatacatttttattttcccctctaactaatatttttaggcagtaggtcacccttgtacttcattagcagaaaattcacagtctatagaataagaattttgcagttacgtaaaagcaaaagggtgtcaaaaacactaaaacttatgtcagttttataaaaattcccataacctacaaatggcccaagtcatattttccactaatttgtgctctgtataaagcctttatttcaaacttaaatctgaaatgaacttctagcactgaggtgcaaattctgtagaaagggaccttcatttggaggccagaaaacccttcctcaggggggctctgacacataattagcattctctgggaaagatgaataaccaaactcggctaacctgttccaggtttaaaacaggatttccttgacttaattgtcctagaataaattaacttttcttctcttaaaacggcatccctataataaaccctgtcttaaaaactacatgtttatgatgagcatttgaatccaacctcacaaataactgaataatgaatgggttatggtctggccagagactcttcccaccattcccccaacctcttgagagaataaactcaggagggtaatcggggcggcggagtggggagggtgagtggaaatgagggtaccttttagctcaatgattttcttaatgagagttcacccaacaaaagtaaatattaaagttataacaagaagtaaccgaagtgcacatttttaatatggaaaaaattaaattaaaattactattcccttagtaaagttaaatgcaggcaggaattttttttacgtgaaaacttccatcaggaaacttgcttttacaatagtcagtgctaccctaattttacccaaccacacctccccgctccaaaaggaaaactccagcagacaaatacttcatgaagtttacctcctgtaccaagttgcttttgacgggcattcatatgaaaacctgacagtatacacactccacaatacaaacagctacgaggcttgaaagcactctgtatacagtgaaagggacactttccaagcaatattcctgcctgctcttataaatttagcaaccacttcagcaagccaaaagacgaaagctgtctaatcttgttcagttgagccgagttgttcaataaagtttgagagtcagtgcagacaggctacgccaggccaaattattgacagaaacacactgtccaccatggcaacaggcagaagtctgctgcaaaaatgtaagcaaacagcccactgctccaagagcatctgccaatggactttaacagccaaacacaaggcaactgttcccgcttctctatgtttaacagctgcaagctcgggggtcaaaccgaaacatgcaattcactaaaatctttcaggaaaaaatgactttaaatactgtcatcataatcccactttgtacctccttctcttttcatatccatgctcaagtggaagttaacaaatccctgcccccagagagctgcccaaagcatcacgttttagaaactgtcccagaatttccaaactcatccaaaagcaagtgacatcaagtcagatattcttggtgctagaaactcagaaaaaaaaaaaagtggggtccttgcaagcagtgcttaggacgtttgcaataaaagtctggagaaggtaatcacgttgctgcatgaagcaggactcgaacacgcacttgtgggcgcttgcagacagacatctatccgatttctcatggtaaccgagggaacaggtttcgggtttttttgttttgttttgttttgtttttttctgtccatgacttgaaagaaaagtttcaggtgattccttcaagataaaaacaaaactctgccaggcatcactaactaaggacacctcctgtcacctaacaaaattagctgattaggagctcacagtacacgtgttcacccccttttcccacttaacattgattttcccttaaaacccattttaatacccactactcctctcttgtcccaagacctagaagatgcggagtataagagaacagacaatacttacaacacagtccccaggctctggctagctactttgcgccaacttctcttggtgagctctctctagctgcgcagaccctctaggaacattctcggtatctctctgcctccctctccctctccctctcccaggcaatgctgctcccattagaggaattaaaagtggttggagccatgctaaatttaacaagctcattagtattctttctgagtgcttccgagtgaactctccctattcaagcctctctctccagcagaagggtcaggcggctaatcattaaatcaaactaatgtcaccctatcacaatcagcctgagagaaggagggtttattatttcagtttatgctaaataaacggttttacaaatggtccccaagcaaggtcaacagcagcttcaattacaagacaaacttaacaagagttgctataaaccaagtactctgtattgacttaagaacaggctccactccacatattgccactagcaggattgtacaggaatgcatattgtaaaataaaggaaggggtgagcttttttctttgccagaatttgcgagtgcacagcgactcctcattcacctctctccaaccagctagccgctcagctcaattcaccccacacaaaggctggagcctagacctcaatggaccgagtgaaacatgttcaaaactaggctctctattgtgactgaatttcttaacatcttttcaaaaagcggagaatgccttgaggctaaaggaagaaacaggctaatggtgaattgggaattctgagcaaatttcagagccctttcctcctagcttttgaggttgaaagcaagctctttcctttcaagtttcaaagtcctttttcctcccgcagtgtcacagaaggatttgaaaagaaggtaattgtgctcgcagtctccctgatcagagcttacgtcctatttctggtatttcggaatacttcttgcaataatagtgcatatagctcaatcccttaaccggcctgcactctgcaattgctcattaaatgaacaattgcgggtataaaatgccttttatgttcaaggtctggatataagataagcattctaggactctaaatttggtttactaaggaaactctccatcattaaattacaaaactgaagtcagaatatcaggctttcccagaaaagtggcactcaggttgcagccagccaaaatgaagggaggatggggcgggcagggaggaggcaacaaaatgttaagggggggtggggggaaagaccggaggatactcagatttctagccaaatgagattctaacaagaaaatactatttccatatttaaggtctgagtttgtgaaaccttgtaacttctatattgaatgatataataaagtcacgttcaaatgaattaaaatacaggactgaggctccataaatatgttgttgactaatctggacccctcacaagcaaacatcttccccatccttaagaaaagaaataaccctttcccatcattatttacatcatctcatgtgatcctcacagcaacccaatgatggcggtaggacaaggtattaggcccagctcagaaactagccgtcatgtcccaggtgagtaagtgatgcaaagaaacttcccagtatgctttactgaatccacacctccctgtcccctgttaacaggacaagagctctgttcctgggtaggcttttggaatgatacctggatatgtgccccaacatccactactaccaccagtaaaaagaaaaaaaaaaaaagaaaaggaatgacattgctatgcacagaaaatttcaaaactgagacactctcccattaagtttttgacaacataaatccactcctgggaaacaccgacagaagcccaaatgacaaatctatggggagacactggacccacgtggaggacccgcacaggtgcaatcctccccctaccacgcgcaaagatacacacaggccccactcagcactgcacaccctctccaccgcactccaggactcggccaggggctttgtgtgttccaggcatttttaatgtgtctccagaagcttggggccccaccctcctgtcctgaacaagacacagagcataatcgtctctcctttcctcccaggaaattgcttcgctgtgtttgcaaagagcattatttcatttttttcctattattcatttgttgcatcttatcagcttttatttctttggttatttacatgttgatgctctttgaataaaaaccaacggaatccaagtcctcgctccctgtttcagaattctccccaagactgaccaaagagagatcagaaatgaaaaagagaagaggctaagtatattcaaaagcattgcagaattacgctaggaagggggaataaagttcctgtagttttaaaaagcagaatatttcctctttccatctagattgcagttctgccaaagccaggggctgctccctagaatgtctagagcttggcttccaaagggcgtgagcaaacaatgcccactctaagaacatttccaataccctcggggtcagactttgcccttgtgcagctacacatacatctcccattgacaatgacggatgacagagggaggggcccagatggatcaggagaaagcactcagctttgtttgcaacctttaaactgcactgccaggcctgcaacatgagagggctgcagcagaatttgaagccttggggaaattcaagtgacaactctccctcaaagattatgggattgctctctcttcctactttcaccaaccaggaggtcccagggtgaaaggagagaaagtagaaaatgctctccatcaggccaagcgtggtggatcacacctgtaatcccagcactttgggaggccgaggtgggcagataacccaaagtcaggagttcaagaccagcctgaccaacatggagaaaccccatctctactaaaaaaacaaaatcagccaggtgtggtggcgcatgcctgtaatcccagctacttaggagtctgaggcaggagaatcgcttgaacccaggaggcggaggttgcagtgagccaagatcacgccattgcactccagcctggacaacaagagtgaaactcagtctccaaaaaaaaaaaaagaaagaaaaagaaaatgccctccatcagagccatagagtagcttaattgttttcatatttctactgttctttttaccaaagaataaaacataatctagactgaccaatatcccaatggcttccactggaaaccatttgctccaaagagcagcaggttagagctcaaaccaaggcaaaattctcacctcactccccaactgctcagtttacagagctccattcaacttcaaaagaggtccctgggatagaagggagtgggcagagagagcaagatgagaattcagataaacgaaaatgtaaaacctgaaatggctgttcccctcactgcagcagaaagctttgatggcatgcagagcaagctgcctcctgtattttttttttaaaaagataatgacaatgatgagcagataacactatcagcttgtctgaagcttcagcaagtatgccctgtagcccatagggtttccatacattttcctgtgcccctgaaccctcacaaataagaggtctgcagccccatctctacccccgggaggatgcttctgaacactgatgacgaggtcagcgaagattgctgtgacctggttgaacactgccctgaacaggcacttaagtgcaagcacaaacccaagggtactaaccatctttcaaagctccctacagaaagacttgccaaatccagcatgcacttgagaacaggaaaatataaacaaaacagtacccttgagggccccagcgggttcgcctttaaaagggaggagatctaccttatttttcaagctcttgccaagactctttcttgaattaagaattctaaaacaacgtcatggagcttcttctattagtctgctattagttgccagtcgctgcttacacagagtgagttaattagtggcatcaaaggcagtacaataaattccctggagggtcaaaaattttgccttttgcttggtagcacatttatgactatctctctctgtgagtcacagtctcatgagcatttaggtattcgagatttctttgagaattcagttttagtctttgacaagcaaagaatgaagagtctctctttcttactttgcacatacagacctgagcagttaagattccataacgagatccacggccaacagttaagcagaaacaatgacaggcctgttcagaaggccagagtgtccaggttgctgccacctggctgcatcctccgatgggaatgatcctatcactctggagatctggcccagcccctgtgtggccagaggacttacagcttggttttcctttaaaggcacgaaggaataaacctctgtgtgcagcagcttcttcctttggcagtgctttcagatgctggttcccaggtccacaccctcctcccatcaccagcaaagttctatttcctaacctttctaacatttttccaaactgcagaagtgaacacaaacttaatgggctgcatctggtgtgtttatgttgcatgtttttgtttttagaagatcacggaatgagaaagcctgagcatatggtggtattatatttttaataacattttagagaccatgcttatgcccttgcaggaatcaggcgctcctggagagtgcatttaaatatcacgataataccattattgtaccaaaaggagctagaggccacatgacccccatgagggacagacagcaaggctcacctacactcaatcagcctctgggcaaaggccaggtgctgcccgggtcaggtttctgcaacagaaaccccctttagctatggcccactgacctcagctatgaaatgtgcatttgagaaacccaaatgaaaataccaccttttgattcttcacaattgtatctaagcagcctgcttctagtgagttagccacaaaagtctgtacctttacaaaatctcagataatggctcaggtactgcctatgagggaggagagaaaggccacaaaatttcacctctcacaaagcacaccttcatggccacagacatgacgctagctgctctccttcctcacaccacagccccaggagttcactcacttagccaccaggctgccatgtctctaaattgtttaaggattcgaatttttggacgaaaggaagtgggaggaagagaaatatataattatttctatacaaaatttctaaacaaaaagaaaaatgtcaaggaaatgcaccaattagcataaaaatatttgtatggatttttaacttatatttctcaatcatttagagtacagaaaaagctgatttgtttgtcttttatttttaattctatgtatgacctttactataattatctaaagaagttcaaattaagtacatacaaattgaaaaattatcccacaagtttatctgttgaagccttgctttaaactatttattccatcccttgaaacaatagaacatagctaagatacaggaggctaggtgtgcacatattaataacaccccccgctggtataggactttaaaagattttgataaattagcctatgtaaaattatgtcattttatgtaaaattagcctatgtaaaattatatcattttgataaattagcctatgtaaaattatatcattttaattatctcctatgcatatgcaaacacctccccaaaatgtcaaaaataccctaaggtccctccctgaaaacttgttaactcagcttttaccagcccactctggaaaggcataaatgggaaatgcgttaacaacactagactatactctgcgcctcacatttattgagcacttactaaacgccaggccagtgctatgtgctccacatgcgttaatcccactgaatcttcacagacctgtccaggatgcagtatcatcaaccagttattcagctaaacgtcctgaggtttaacaaagattaagcgactggcttaaagtcacccttcaggtaagtgcccagcttggcatgactttcctttgtattataaattactattaacccctaaaatgtggcttctgtgaggagtttttgagagcattcatttgcttgccactgttctatctgtacatgtgaagactatttttttttttttgggatggactttcactcttgttgcccaggctggaggtcaaaggcacaatcttagctcactacaacctctgcctcccaggttcaagccattctcctgcctcaacctcctgagtagcatgagagagagagagccaagcactacacccagctaatttttgtatttttagtagagacaggatttcacaatgttggccaggctggtcttgaactcctgacctcaggtgatccacccgcctcggcctcccaaagtgtggaattacaggcgtgatgtgagccaccgcgcccagctgaagactattttcattgttaaaattattctgcctcttcctctaaaggccgtcaggaagaatactacagactttaatcaaacgaacttaactgtaaactttaagccagagtcatgaatgaaacatggttcagaaacttcttcgaatttctcattctacttctgttgtcgctgttgttacttttgtcaagctcaggccttgggcacatttagtatcttgcagtgtaaatgacacctctcatgctgtggctaaattatcttcttgtcaccctatttctccccacacctccccatttctatagggtttccaggttctgaatagctattttgcaaaaaaacaaaacaaacaaacaaaaaaaacactgtcttcagggggactgtgatgaacgcttagatgcaagaagcagcctaagtatttggcttgtgcttaacttaacaatagctccaacagttagagccgcacatagtttattgaaaggggcatatgtccaaaagttaaagaagcatatggtttacagaaaaaggaaaaaagacttgcacttggaagcagctttgcttggattatttaccaacaaatgaaaggcccttcatgctgcccaagagtataatcccttcccactggctggaaaggaatgctaaatgagtcaataaagtcagaatcatacaacacagagacattctcccttcccaactaaagatgattatcgaattatagcaaatttaagaaagttttctctttttttaatcaagaacaaaaccagactacttcttaaaatgcactattaggaattgtaactgttcctaaatgtgccagatatatttccatccatgcgatattaaaactaacaagcgtcttttcaatttcttttaatgatggggtatgcaataaaaatacagcagtgcttcatttagccaaaggagctggagcaaaaaagacctaaataaataaataataaacgtgcatgggccacttaccaaaactaaaatcatttcattcaaccttttacaggaggtgcatgcagtattttgaaagcaaaaattctcataacacaaacctccacttaaaaatcactgccaagggctggaaccatggcaggatgttatttctttttcaatttattttttaatgtttgggtattaatggcatcaactgccatgtagtataataaggcagcacagtgtaataaaaggagttagaaaacctagctcccagacttgctcctagcacttaatcggtatgtgacccagggtacattaaaatatatcaggttgtcagctgcctcctctaccaaaggcagatagtaaaacttgcccctcttacttcatagggtattgtgagggttaaacataatagcatatgaaagagagctttataaactgtggcatttatgaaagctaggtactatcactaacctgataatctgtgtgataatgcaaaacagggtggcaagataattgagccctgggccaggcattggatttccaggccttggatgtccaggttgaatatcccttattcaaaatgcttgagaccagaagtctttcggatttgaaattttgtcagattttggaatatttgcatatacataatgagatatcttggggataggacccaagtctaaacacaaaattcatttatgcttcacatacacctcatatccatagccttggggtcacggcatacaatatttctaataattttgtgtatgaaacaaagttttgacagcagcccctcacatgagatcaggtgtagagttttctacttgtggcatcacgttggtgctcccaaagtttcagatttggaagcatttgggattccagattttcagatcagggatgcccaacctatactgctagaaatgtctaatgttaggcaagtcacagaatttctttgggctgctgcttccccttatataaaatgggacatctcctatcaacttcagccaacttctcatagatgtcctaggaaaaaggatggtgcagaagagagctccgtaacctctaaggcaacagaccagtggacgccttcaccaagcatcaggatagacagcttaggagggaataactgctgttttacaaccagaaaaaaagctccaagttaataatctataattaaaactggtcatctcttttacccacttcttcaacgtatctctggtcaagccccaaatcaacatttactagacaagtatgcttagttcttcaaatatctgttgaaaacatcaatcccttctacttggttttctacagtgacttgagacacttgaaattttcccgaggaatacattttgtttctccataaacaatatttactaagaaaaatcaagcaaattattttagggtgattactgacaacctgtatcctctgactgcttttgtacagcctgtgagctcaaatatatctcaaactttttaatggatgaaaaataaccaaaagaagaataatatttcacaacaggcaaaaatgataggaaatttaaatttcaaggtccataaataatgttttgttggaacacagccaggctcattcattttcatgttgtctacagctgttttggagccacaacagcagagttgagtagtgatagaaactaaatcgcctgttaaaatctgaaaacatttactagctggtcttttgcagaaaagtcgtgttgtcctctgacctaccttgtctcaggatatgacaacaacacccattagtaaaactatgaaacacacctaggaaaaatattcaaaaaataaggtaactatcatctccacagtatttaatatgaatgctttgaaatcttaaaataactatgaggcagacagcaatatcatcctacagatgacggaaataggcttagagaaattaacttctccaaagtcacaaagttagtaagtcagggatcaaatcagtctcctatgattctgaacctgacaattatatgacctagtgtggcacatacatttgttaatagggatgaaagaggcatatccaagaataaagttttgagagttcctcttcccacataattgggaaactccttgctagaggcagaaacaaatgtagtcaggattctgagggagtgtttccacctcttgtgtcaaaaattgggtaatagggtttagagcaggctgagtcaacacaaacaatacaaaccagcccaggttggttcttcacattcaattcatacagactcatccatgtcaagggctccgtgtgtcccagcatgaaccctgaccttctaaggggagtaaaaacagaatggctgctgccctcaaggcccacattactgatttttctagatgagaaactacctgagaagggacgcagaggctacagggttaacacagggtaagcagtaatgtaaacattaggtaaaggccatggagaggaaaggcctcttcttcaggttttgactgtggggggatagaccaggcttacctttgtagaggaggtttgaacaagaattggtttggaaagtctctagttcaaattttcaaagaggctgcgatctcaacccaacccctcagggatagattcaactgaactttacagtctcaatgactactctgatactctaaaatgttgcacctttggtttaagttgagaacacatgtaattttttctgcatttttctttattctttaattcacatcttgttgacacaaatggaaatgtacttttttggcagaaaaactttaagagaaataataatagatttcgcactgcactgctgccaagtcattcaaagaactcttccatcctaatcacattgtctgggccagttctacgaaagttcccaagaagagttgatgaaaacggcaaacgaaagacataatcaaggctgtgttactgtgcctgacaattctgtcaattctactgagttcctcttatctactctactgcctgtagacaaaaataaaaatcttagtatggaccagctagaaaacgaaaccacccctcctataaaatgaatgcacctcagagctcattcagcagaatattagcaaccactgcaacttcaacccctgctttgtcacaaagaagcagcttctccttggctcccaagtagctcggccttacaaagctctcttgcctaaaggaaattcatttctgtttccctttctatgcattactgtctctgaagtcctggggaggagtggtccaggggaaggaggaataaacacctttttttttttttttttttttttttttgtattttcaacctatcttcaaatctacacggcaaacttggaatttcctgtcaaataacaactatcctcacaaactagatatcttccatccaaacactgatcttttgcaatactgacctccttctgtaatattcaggtcacagtcttccttgccaaaggcctcataaattactcagactcaaaccaagagttatctatctctatacacctgcctttctttgccccacattaaacagtactcttctatctcacctctgcttgtcacacccctccggacactgccaaagaatgctcatctccatcaacaacaggcctctgctctgtagctgcctctctctgatttgccttttccccaactgcagttgtctctaccctttcactctgagtccttgttgaattcaacgctgcctctatctaatgaaccatctctattttcttttctttttttttttttgagacagagttttactcttgttgcccaggctggagtgcaatggtgctatctcggctcactgcaacctccatctcctgggttcaagcgattctcctgcctcagcctcccgagtagctggaattacaggcgcccgccagcacacctggctaattttttgtacttttagtagagacaaggttttaccatgttggtcaggctggtcttgaactcctggcctcaggtgatccacccgcctcagcctcccaaagtgctgggattacaggcgtgaactaccgtgcctggccatgtaccatctctattttttacacatcacaaccactgggcacatcatagatctcatgaccccagtgtctctctttttgactttgtctggcttgcacttgacccctaaagttttccacaatgtttctaaggattgttctttggccaatttaatggcttccttactgtgctgatgcttcagtcttccggccactctgttcaagtaataatcttttgcttacttgtctttatcaatctttgaaatctgaatggttttaaaatattactttccaagcctatgcaatttttttttccttttgtaatgggtctatctggatagacttgaaattcattgctagaaaaacaccaaaatgcatgcaaaaacacaggttctaatttaatggctgagtagaaaaaataatcactaggacacatcctgtccatacccctgcaatatacggacaagctttgaaagctggtgttttaatatagttgtatattcccgtgttgaaatctgtttaaagaatctaaagaccagacatggtggctcacacctgtaatcccagcactttgggaggctggagtgggcagactgcttgagcccaggaattcgagaacaactgggcaacatggtgaaaccctatctctacacaacatgcaaaaattagctgggcatggtggcgcaggcctgtagtcccaacttcttgggaggctggggtgggaagctccttgagcctaagaggcagaggttgcagtaagccaagatcatgccactgcactctagcctgaaagacagataaagaccttgtctaaaaaaaaataaaaataaaaataaaaataattgccgagcacggtggctcacgcctgtaatcccagcactttgggaggccgaggcaggcggatcatggggtcaggagatcgagaccatcctggctaacacggtgaaaccccatctctactaaaaatacaaacaattagccgggcgtggtggcctgtggctgtagtcccagctattcgggaggctgaggcaggagaatggcatgaactcaggaggtggagcttgcagtgagccgagatcacgccactgcactccagcctgggcaacagagcgagactatgtgtcaaataaataaataaataaataaaaattaaaaaaatctaaaagggggttttggtttttttttttgtaatgaaatctttcattctaggaacagtcttaacattgcaagggaaagcaataatgaaatgatcataaaggaaatgaggcttttaaatcactattcatgggccaggagcagcgacacgtgcctgtaattccagcactttgggaggccaaggcgggtggatcacttgaggtcaagagttctagaccagcctggccaacatggtgaaacctcatatttactaaaaatacaaaaattagccaggcgtggagattgcagtgagcctgggcaacagagtgaaactgtgtccaaaaaaaaaaaaagaaaaaacaaatcactattgagtagggtgcgctctctggtgggttatagcagatctgttacaaatctttggcattatagtgtccctgcatccctactatagaaaccacagaaaccagcaaaagttctggtataatacttacctatccaatgtgaactatctttctacatgaaggttttaagagttcaaataatatgcaaaaacatcagggttttcatggggctgggaggatatttttaaaatacccccttagaaatacatattcctgaagcccaagtatggaaacatttttccacatggacacttaaacatcagaaaagaagtaacaaattagtttaatttcactgattgggtcatgaagacacaactgtaccatacaatttatcatgccattaaatcaaatagactgctggtgcatttgggggtctcattccctacttgttctgggtttaggccttgtctataactagctgctagtgatatcaagtcttgaacttcttttgtacctgcctgagctgaccacagaaagaaacatctaaaatgcctcttaaacgtgggcaagtcaattttgtaaagtcactgagtatactaatattctaaataattcaatcaaaaatgtagaatctagtcttgcaaacaaagttaaaaccataaaaccatagatgaaaatccaaaacattgggaaacagatgcttggcaaatccaaaaatcgcatatattaaatcttaatgtcaagagtacaaaagccaacttgtcacagattagtgaaaatggaagcaaagttaaaagttacggtgttccgtatgctccccttcctaaaaatcttctagaagcacatgtcacttccaggctcacaaaccttgcatgaagcccaggtgtctgcaagaccaactccaaactgcccagcctgaatagaggctctgagcatgaagaaccatcctcagccccttctgtcccatcttctgagcctgctcaactttccacccaatgtctaccagagcatttcttaccttgtttggtaattagctattcacttgtatgtctccatcactagactataagatccttgagggcaggcgctggaattcagtactctgctatctcttatgtgcacaccataggcactagtgaagtattctacaggtgaataaataattgaatgaatgtggtgggacttccagggagtgtctggaagcaacagtatacgtttgctgctgttgctgttcttgctgtcttccaagggtggccaaaacaacaggcatctttctgatcgggatgaggccccagagggaataacactggagcatccctgtgggccttggcaatggggccccaagaaacaagatgccaaaagtgaaagcatagctccagttggggggttggagggacaacaaacagaggagaagggggcagagggaagtctcttatggcagcattctgccagcctggttctgattcctttttttttttttttttttttttttttgagacagggtctcactctgtctcccaggctggagtgcagtgacacaatctctactcactgcaccctctgcctcccgggttcgagcaattctcccacctcagcattccaagtagctgggattacaggtacacgccaccatgaccagctaaattttttttttttttagagatggagtttcatgcttgtcacccaggctggagtgcaatgaggtgatctcggctcactgcaccctctgcctccggggtttgagcaattctcccacctcagccttccaagtagctgggattacaggtacatgccaccacgcctgactaatttttgtaatttctagtagagaccgggtttcgccatgttggccaggctggtctcgaactcctgacctcaggtgatccgcccacttcggcctcctaaagtgctgggattgcagacatgagccactgtgcctggcctggttctgattctttatgcctctgttagcgcttgccaggttatcacctaagaacatgatattgctattcatcaacttaaggctggtgttctttagtggaagacaaaatgctaaggacagtaagcaatgggaacgaaaataaacaaacagattaaggacaagacaaatggacacaaactaccatactacagaattcctctctcccagcattgattttccatctgttccatgctcaagggagttgctgtggaggttaatatttagcccatgcatatgagagaagtacaagatgattcatagtttacagagatacccataaaattggaaacacaccagcaaatatctggccctccttgagttattaaattgtcagtttagatatgtttgggaattactgataaattttaaataggtatatatacacttgaaagattaaagaataaaaatttaacaatttagctttttccgtatacatacagagaaagagagagagaaataaacgtaactctggcaatttcttaaaaaggtagggcatttttatgtagcacatgcttttgtttttttctcttaactatcagcctttcatcttgatgttggtaaggactgcatttgccacaggctgataagtggatatggcagaacttcaaaactcatgtcagccaaagaatttagagagagagaaaaaatcagacataaagctggtaaaaagcaactataaaaatttttaatgccttctatttaattctgccaaaagatcacacagcagcaggatccagatttggtacatctctcaaactcaactcatgcatgcacatggcctgaatccaatttcttaccccaaagattgtttttcattaagctagtaaacctaggaaggttgcttataagaccaacaagttaataaactccttccttttaagacaattcaaaagccttccatttactagagtaaatcaagaaaaactgataaagaagaaaataacaagacataagacataattcttcacttagaaatgatagcctggtcttaagccaacagtcattatctacaatttaaatcagaactcagtaccttgttaagaaaacttcattactctcatccttcctaaaagtaacgtcaaggaaagacaaaaacactgtgcattgccaagtctgtgctgttctttactttgctcaagagatgttaggggagaggagagaataaagatgtgggcacaagaaagtttgtgaaaatattgttctactcccaacaccaggggcaccaaaaaacatgtagcagaatattcacaggatcgctctttgtaaccaaaaatgtgaagccaccaaatgtccattagcagtaggacagattcataaattgtgatatagccacacaaaggaatactatacaccaagggggatgaacatgcacaactacatataatgtagatgaatctcgtaaacataatgtagaccaaggagaagaagccagacacaaaaagaaaacaaatctataaagttcgaaaacaggccgagcacagtggctcatgcctgcaatctctgcaccttgggaagctaaggtgggaggatcacttgaggccaggaattcgagaccagcctgggcaacacagcaagacccccatctctaaaaaacgttttaaaaattagccaggcatggtggcacgcactagtggtcccagctactcgggaggctaaggcaggaggaacacctgagcctgggaggttaaggctgcagtgagctgtgatcgcaccactgcactccagtctggacaatgaagtgaaatcctgtctcaaaaaaattaaaaacaaaaaaataaaaaataaaatacatgctgttaggtgtcagaaatcaagatgggctagagggtgctgaatgggtctgtttcttgagcctaattctagcttcacaaatgtttggtttgtgagaaattatctaactgcccatttatgagatgtgtccttttctacatgcatattctctttggtataaaatggaaagtgtcaattcaaaaaacttccagacagcccttcaatgtctgcttcagatctgtctctgtgcacccattcacaagcaccattatttttctaaaatatgaaacttacagctgtttattttagacagcctaatatatattcaaacatatgcaatatataacaaaatgttactctgtatcaaaaaagccgcctcaaactgtgcatgaacagccaattcagtgaagaagaaatttaaatgtgcaatatgaaaatgaaaaatagttgtatttcattgtgttatgaaaaaaataaaattgaaacatgatgctatttttttgtcttggtatcaaacgaaaaagtgctggtaaaggtttaataaggagcatgcactgttattagcaggatagcattggtgcatgttgaatactcacatatacatacaccaatttgatgatatggaggacaagtcttaaatgtatatactggttggcccaatcctccccttgctgggtacatacccaaagaagtaattcaggttctatgcaaagacttccctaaaaggatgttcactgaaacaatatttataatagagcaagtaaaagtcctaaatgcccaacaatagaagattaataatgcccacaaagcacaaaaaaaagaagagaagcaaagagaaaagagaaaagaacaggaagcaaatgccaaaatgttagcagtgatggttatctgtgagaagtcaattacttcttattacttcttatatttcaattacttcttatatttcaattacaatcaattgaaatataagaagtaatattcaattacttcttatatttactgtgttttccaatatttcgctaaaattaaaaaaaaaaatcaggccaggcacagtggctcacgcctgtaatcacagtactttgggaggccaaggcaggcggaggtcaggagttcaagaccagcctggccagcatggtgaaaacctgcctctactaaaaatacaaaaaaattagctgggcgtgctgggacgtgcctgtaatcccagctactcaggaggctgaggcacgagaatcagttgagcccaggaggcagaggttgcagtgagctgagattacaacactgcactccagcctgggcgacaaagcaagactgtgtttcaaaaaaaaaaaaaattatatatatatatatatatatacacacacatatgtatatatttaaaaacttctcaatgtagaaataaatgtgtttttatcagggctgtttcaaacttaaatattacagttcttacagagaacttactgatctttttttttttttttttttttttgagacagtgtctcgctctgtcgcccagattggagtgcagtggcacaatctccgctcactgcaagctccgcctcctgggttcaagccattctcctgcctcagcctcccgagtagctgggactacaggtgcctgccaccacacccagccaattttttgtatttgtaatagggacgaggtttcaccatgttagccaggatggtctcgacctcctgacctcgtgatccacccgccttggcctcctgaagtgctgggattacaggtgtgagccaccacgtctggccttgctgactttttaagaaagtacctggtctttctgaaatacaagttaatggtaaataaaagagatgccagcactctcaccacaattgccacaatcaagtatttgcttgagaattatttttttctttcctaaatcccctgtaggggtgggaaggaggtattagacattctgtgagctcatgcccagtttaaccctaattcctcaggcaaaatataacctgtgagctttttgtggcttctccctgcagcaacaatctgattgactcagcacacagttatttattaatcattctatgtaaaattatagggttctataacaattgtgcagtgtcctccattccccactcacctcactttccagctcttctgactctatacagctctaggaactgtattatcagttcactgtcttgcatctcaccttagcttctaataagtgttagattcaaagctagacttgattgcaaaaattttcaagattgttcagaagtctgtatgagatgtgatttcatggccttttctatcatacaagtccactgtcacaggcttcacgaaatagacatttagcaagacattttaacacttcttcccaagtgaaaacttcaggattttttaaaaaacttttcctatgaagagaactaaggagataataggcctaagtacagaagaagcaaattaaaaagaatttccaactcccacatcactatgtttaagcaatgtgaatacatccacaagtagaaaaaagactagaaggaaatgtactaaaatgttaacaattgtcatccacacatgaatagtgaaataaggctaatatttgttttattttgctatgttcttcaatatttttcagactttccacaatgattattgcttttgttattagaaaccataatcaaatgctacaggacacagaaaatgcggggagaaaaaaggtagacgtctggtaatcgaaggccctgggacttgcagcttctcaacttgctcaagtttatacagttcttaaagctttcttccaaatgtaggtcaaagctaagtcactgagtccttagagaattccttctgtcactgcagacagccctctggcatttataatccatagtggaggttgaaaatacaggtgacaataaagaaaagacccaagactgtgccatgatctgtttttatctatttttcttagaaattttaatggtatttgggggcagagtttcccaacaaaattgaacagaatgtaccttcacattgcctctgagaataaaacaatgtttacggctccaaaggacgggggtgggggtgtctataggactcgtgcacattctgctctcatgcatgagatctcagctatgggttttgaacagaaaagtatatttccttctagtcttttctctactcctggatgtattcacattgcttaaacatagtgacatgggagttggaaattctttttaatttgcttcttctgtacgtaggcccgttatctccttcgtagttctcttcataagagaagttttaaaaaaaaatcttgaagttttcacttgggaacataaaacaatattaactgctccaaagggcagagggtgggggtgcctgcaggattcatgcacattctgctctcacccatgagatctcagccatgggtttcaaacagaaaagagggatccgcatgtcttaactcactgcctctgtggtagaggagaatttgcatggctggcatttctatcaaaaagcagaattagatagtaagatgaaaaaggataaacttttttacactaaaaagtgtaaatgaattaaatgaataaagtggtcttgcaatcatcccgcacctaggtaaatgtatgggtttgtacgcattctttggagcttccccctttcaaggtagcccatccaagaggatctgtggctgagtcgtttgtgcagcagcagggatggacagcgcggatgcatccaatcctcctggtccagcctctggcctgggcctccaaatggttgcctgggagaaggggatgagttttcagcagtggagctgagagttttccgtgagtaaagttaacacatttcattacttggctattatcaccttctatttaacaaagcacaagccatttatgactctcaaagagccattcaccttctacctaatatcactctcacagcaaccttgcaaattatgaagattattccacattttacaattatgaaaacagacttgggatgaagtagcccaaaccccatccctgggaagcagcagtcagaaggagagagaaaggaccacggacaagtgaacaagaagtccagtgcccttacccggtagtgcctgccctctgcagggtagcccactgagcacactgtagaccttactcttccctgcaagtcaaattgtcacaacgacgggtatatttttatgttgcattctcccacaggtagatgtaccataagtgctggtgaaatacttgatgcctggctgacttggagagatgcaacctccacgagcactaggctgcattagccaagccatcgttgacagacacggcgggcaaaaaatattctaaaagaatcagttgaaatgcctaacacagagacagaaatcttttctctctcttcatgtcccctcatgtcccaagcaactttaagttacttatttctaaagcccagtctggccctatttttttaaaattgcattaatatgacttgttcagtctttgcaataaaactagcagcatgaatggatgaatgtcctgcacagatccaggtaacgagggtactgtctattttggcttttgtggaaagctgcccatttattctgatttagaagcaaataaatattataatattctccagtcatttttttcctgtattttcctgtcctctttccctttttttatgtgtaacctgaatgatcctgccagagtctgatgagagccttctaaaccaggctcctttcacgagcacaaaagactttcagaacctctcattcccccaaagcagaaggaagctcagagaactctttgggaacatgatcaactctagcacagccactggctctcaggaagggtccatgttccctgcaacaggggagttacccaggggagatgaggaagcaaagtacacgctaagagaactcaagaacagaagcagagctggtctatatcagccccttaccagtttacacttttagtcattttatgctgggcacaagcttgaccactgccacatggcttttatttctgagaaatcactaaaggattacagaaattttggcctgctatgttaattctaccaaaatatcctaattttgtatttttccaaaaggccaaaaggcaaatggaaagcagatagctggtgatatttgattttctaaaaaaaattaaattaaatgcagcatggtttcaagtattccataggataaaagactctcaaatatgtacaagccatttatagttaaaatactagataaaacataaatgttataattgagaatttctgatggcaattttactgaatttaaaatcaataaagaacacccatcatctgggtaactaattttgcttttccgtctgacttattccacctaaaccaggtaaccttcccacaaaataaatatttcttttgacgttgcttatgaaatgtggaattgacccagaaattctaatttcctgactttgtttactgagaactctgattcaaaactgggtcaagagatgtctgcattgtatgtcaaaacttcttccaactgaattcacctttcagccagtcccgcggactcagtggacttcatcccaaatgcctgtttattcatttcctcccctggaaacgttaaaagctccgtgttgttaaccagctggttagagttgagcaaatcctcataaatcagccctttgcccaacgagctgggagttcatggtcgctcttccctgacacacagagaaaacaactgaagcacatttcggttcacaaaagaacattcacatgttcacagacctcggctttcatctgtcggatcacagttcgtttttgatgaactgtgttcatcaaccgccccccagggccgcacagagggtgacggcacgggcgaggagtctggctgccagggttcaaggcctggctctgtcactacactcagctccagctcgggcaagtcactgaactccccgagcgccatttcctcatctgtaaaacgtggaaacagcagtgggcttgccgggaggattaagtgaggatgcgcaggggaagtgttctatagatgtcagctctcagtagaacctctgcccccatgctgacatgaagtatgtctatgaagcggtgggattgtctttcctgcctgatttctgtaaatgccgtctgttaccttacagtcgcaccttgtgcaactgtttgagtccattaaattcccagagagaccctgagactagctgatcaaaaacacaccacctatgtggtacttggtgtgtctgtgtgtctgtgatcaacaaagtgataaatgcttttaagtgttgggattcaccattgatgctagcatgaataaagtacactgggccagtccccccgaaatgcttgccttccatccctcggtccagttgtataagctgaggaaacagacttcacccttttggggctcagtctcttcatttggagaaataggggctgggtacagtggctcatgcctgtaatcccagcactttgggaggccaaggtgggctgatcacttgaggtcaggagttcgagaccagcctggccaatatggcaaaaccctgtctcgactaaaaatacaaaaattagccaggcgtggtggcacacacctgtaatcctagctatctgggtggctgaggcacgagaatcactggaacctgggaggcaaaggttgcagtgagctgagattgtgccactgcactccagcctgggtgacagagtgagactctgtctccaaaaaaaaaaaagaaatgacagtagtctctcttacaaaacttttgcggctgaaagtgagttttaaacaaacttatataaaaagcataaacattaaaaaccattaactctatatgggagtaactggattccaacttgcataccatgatgtataataacactaacagtaacaactaccgaatatcagactgtacaaaaccctttatctctttgatttccttaaatcctcaccatgagcttattgtttccattttataaaataaatataaataaataaaaccaaagcttatagaaggtaagaaacttccctaaggccacacagcaaagccagaaattaagcctgggtctgttggatcccacagcccacgcacataactctgaacagtacagggcccaaaaccaccctcctactggcaccaagtctgaacttgtcaactgagctccaagtcacagacagaatgataaaggaggattgtcacacaagtcaggcatggtgaccgaaacagggactgatgtcctggccagcttgtcatgaagccctatttcaatttgattaacatttactcataccccattactttagtccccatatgctggtgctgacccaaagatatcctcaaagatccaccaagatgccagaaggcagctggattccaagcagaggtacagagaatgccccctccacagttctgtacaggactttccccacaagtcctgacaaatcctgtgaaggcccataggtcacatgaagtccttcatgaaaacagatctatcagctcaggtttctaaaccttcttctctaacgccacccaggttcctctctctctttctctccaggggcctgcctgttccttctgcagtcagaagaacaagacatgaattcatgcaaacagatgcccagagaggcacaagcccatggcttgcacaaatagcgggattgccaaccccagtctgaactctgccagaacaatctgcttcctcatcttttatgggtctaagacaatctgcttctttagccctaggctattgagaaaaatacaaggtccacaacttaactcagtgagcattccctcaaagaaactattccctgaatcttcacctagttttgctgctctcctttggaggtcagtgaaggtgggatattgatccccagggtccacagcccagccctcctcagtgcagccctgcctgagggtcctgggaaaccaggcaatgctggaacccaaggaagagcacaggatcgcttccctctcccctcaggcactttttaaatctagcccccaaatttccaggcagggggccaagctgttcaatagaaggcatacactaaactgaggagccagactggaatgggaagtggccttctcacggagctaagaagggactctgttcattgatttatccatccctgtctaattcacctatttactgaacacccactttgttacaggaggggctgatctaggtgctgacgctccagtgatagggacactccgtccttcccttgagagcttacatgtcctagttgcagcccatattctagtaggggtgggtgagagtgatagaaagagagtggccagaggtggagaggagtgtcagcaaaggcctcagggaccctcacatcaaatattgagaaatatcccctgatgcagagtggggaggagagacggaggcagcaggaggtcacatattcaatgatcaaaaacataaagaggactgtaacttcaaataaagagaaagatttcatgaccttggccttttagaagctaagggaactgaaactgaaaaggtcatataagggcggaaaatgaagcagagtccacaattatcacctgtttaaaggtgaggaaaatgaagtgcaaaaaggaagagaacacacttggcatatggcagcgttggtttgtgagccccatcagtctgatccagaacttaagcctttgcccactgagctccagttctacatttctatggcttaaaaacatgtagatattcaaaatcctaaatatgatggaaggaagatcatcagtaagcagcttattcaaaggttatggggactgaagacaaacggaagagtaaattaatgtgaaaaaacatagatgggccagcagagataagcaaggggaaggtttaatagagcgaagctgatgcaaacaacagtgtgctcctctgcaagagtgcaccctgtctcctcgacgggctcgtccagtaagacaatagcagaggctcacatgctgctgggatgtctaacatatgatgtctggagaggctttgctaggggcagtatcactcacgactccatgaacattcacgcaaccccgctaagtgtggggaccagctggatcctggtgcaccaaggatgataaaatggcttcgccttcatggatctcagtcactagccaaacttgacatggaaaaaatcagtgctaacaagaacttcaggtgctattcagctgagaatctgaggggtacagtgaatgtgctgcctctgggcccaagggcccagctgtgtcccagctgagatgtcggccaaaagcagcacacaacaaatgtccacacactcaactgctctgcttagaacagaaagctccagggaagacagtcaggacaaaatgtgcatcacctaaagtgccaacaaagttgtgtatcatccctgcagcttctgctgagaccccagcttaccatcatatcagtaaggcaaactgcaggccacccagatgcaggcgcttaattccatagtcattgtaaaagctcctcgggcaatgaccaggacggcagataccatggtactgaccattctggaatatgtgtctttgaaaagatagcccactcccaccacctacagaaaaacaaattaaagctaaacggccttgcctcttatctccaaggaactcatcaccccccttcaagaagaaaggagagctattccttcactgctacaaagaagggctgcactagactgaatcaggccccttcactcattcagcaaacatgtactgagctcctactgtgtactggggactagtagctagaccctggtctagacacttggactctagcaatcaacaaaatagacacatccccatcactggaagattagagtttaccaggaggaaaggatagtgtttgttagaggttaccaagcggctatgggaaaataaaagtagagtggtgttcagtgggaccaggcaaccgggggtaggcaggaggcaggcaggcagacagagcaaggtgatctgggtggatcacacaaaaaatggacatttgagcacagacttgacagacatgagcgagtcaggagaacagacacaggggaagaggaagaagaaagagccagggcaacaaggcaaaaatgttcctggtgtgtttaagaaaaggcagtgggcagtatggctggtgatatggtttggctgtgtctccacctaaatctcatcttgaattcccatgtgttgtgggagggacctggtgagagggaattgaatcatgggggcaggtctttcccatgccattctcgtgatattaagtctcacgagatctgatgatttttaagaggggagtttccctgcacaaactctcctcttgtctgctgccatgtgagatgtgcctttcaccttccaccatgattgtgaggcaaccccagccatgtggaaccgaaagtccaataaacttctttcttttgtaaattgtccagtcgtgggtatgtctgtattggcagcgtgaaaacagactaatacagctggagcagagggaaggcgtgggtgggcaggtaacgggagggacagagtgtgctgcccaaggccactgtatggacattgactccaagggaaatgggacccttgggtgagttttaagcaggagagtgacataatccaacttatatttgtaaaggctcactgtgttgacaacagactctagtaaagcaaggatggtggtgaggaaactgagggctgttggtgcaatccaggaaagagctgatggtggctcctaggaaggcagtgagcagggggcagattctggtgctttatgaagagaaaagtccacagaatttcctagcaagctagacttgggatgtgtgtgtggcaagggggtatgggtgtgtgtatgtgtgagagagtgagagagagacggagaggtgagggagtggggaatatggttccaatgttccaccgttgggagcctgaagaactgaaagcatggccttgccatcacctgggctagaaaaggtgtagcagcctgaagtgggtggagagtagctcatttcgccaatgtcatgtttaagatgtcttgcagatatccaaacagaagtgtctgatgggcagctgatacacaagtgtgaagtttggatgggagagagcagggctggaagaatgaatttggacgttataagcaaatcagtggtatttcaattcataaaactggctgcgagctcccaaggaataagtacagagggagaagagggcccaggtctgaactctgtgctctcccatgtgcaggagataagaacgaggagtggcctgcagaggacaggcagtggtgggggcggaggacaacagagaaggcccagctatcatgcagagactgtgccaggtggagcagggggaagacccctgtcatcatgtcaagcataatgaagactgaaaactgaccactggtctaagcaaccagaggaccaacagtggcctggacaaggcagcttttgtggaacaagtgactggggcaaaaactagagtgggttcaaaagagaatggctgagggtgaaaacagcgagctccaatggccctgtgaaagagagcttacacacagaggagccaggggaaggtggcagctggtgagatgaacatggtcactgagtgtctgtttcttttcagaggatggacatgtgtatcctgatggagcaatccagcagaaagacaaatcaggtgacacaggcgggagagaggtggagtgatggcctggaaaaggctggagggtaggacccaggatgcgctcagcattgcctttagacagcagccaaacagttcgaacagctcatctgtgggaggcagtgggcacagaccctggcagatgagaagtcggtgaaaattatctcctgttggagtgaaactccaagatttccttagtgaaagtagaaagtaaggttatcgctgagaaatgacatccaaaaaagtctttgacatccaaaaaggtataatgtgtaattaccctttctattgtctactaaattatatagcccaagaataaggaaatctcacatctactctaaaatcctctggcaaacctggacctgcacagatgtttccttactggaaaggcgttccaatcgttcacccagtatctggactgggggctggcaaagctttttttgtcaaaggctacagtgtaaatattttcagttttgcaggccagtctgttgtaattctgcaactctgcaatagtagggctaaggcaaccacacacaatcataaacaaatggagtggctgtgttccaataaaactttacttacacaaacaggctgggtttggccctccaactatggtttgccaactcctataatctagaaaacagactttctagggattatattagaatatcagaacttctcacctacactaaaaatattactgcctaacaaatggaaggtccagatacatcacagacagcaatgggtaacatgacttaaatttcagcctatgcagaatttccaggctaggcgcggtggctcacccctgtaatcctagcactttgggaggatgaggtgggtggatatcttgagcccaggagttcaagaccagcttgggcaacatgatgaaaccctgtctctataaaaaaatccaaaaaaaaattagccagtgtggtggcgcatgcctgtggtcccggctacatgggaggcttaggtgggaggactgcctgagcccaggaggtcaagactgaaatgaaccatgatcacaactttgcattctagcctgggtgccaaagcgagaccccatctcaacaacaaacaaaaaaacaacaaaaacaaaaacaaaaacttccaaagccagttcatatagtttttagtataactctataaataccattcaactgtgatttcgaggtgtaataaaaacattccattgccccacactacattcccctaagatgactatacccattttgcaaaaagataatggcctaggttaaaatactcacacgaaggaacaaggtctcatacatcttggtaaataacatcaagcactaactagctagaaaaatcatccatgtaccgaactttccaggaactagttgcctgggccagtaaaatgagacttccatcttcagattacaggacttcagagtggtccttgtagatgagctagctttgttactgttgttgtttcatgtttagggtcatctgtaagtttgtctgtaagaactctttctctcctaggttcctggggccctacgatttacaacgggcctccaagagtccaggaatctcttggattctaaggctatgagcagcactgtccaatagcactttctgtgttgatggcgtgttccacaggtgctccgtttggcaaggcagccagtagacccgtggccggtgagcacttcaaatacggccagtatgactagggctgaatatttaattttattccattttaatttacataaatttaaatataagtagtcaaatacggtgagtggctaccatgttgcgcaggacagctttaggggaaaaaatggaaatgaaaatgtaaacaggtactacttttcctttcttcttttctgtctaaattctccaaatagtaccaaagaccctgctttatatccttgctttaaaattaaaaaaataataataataatccctgtaaacgcatgctctttacccaaagagccgaagtttctccttaaactttttcgccaaaggacctcacatttcacttctgaccagctaagcttattaccaactttccaatattcaatggaagacaaggcctcacatagtattaaaaaaacacatttttatatgcatatgtatatgtgtgtgtatatatatatatatatatatatatatatatatatatacacatgtgtgtatatatatatacacacatataaatacacacacacacacacacacacacacacagaggaatttttttggcaaacaagagtcccaaacaaattgcttttggccaggcgtgatggctcatgcctgtaatcccagcactttgagaggccgaagtgggcaaagtgcgcagatcgtttgaggccaggagttcaagaatggcctggccaacatggcgaaaccctgtctctactaaaaatacacaaaaaaattagctgggcatggtggttcacatctgtaatcccagtactctgggaggcctaggtgggcagatcacttgaggccaggagttcaagaccagtctggtcaacgtggtgaaaccccgtctctactaaaaataacaaaaaaataagcctggcatggtggcgcacacctgtagtcccagctactcaggaggctgaggcatgagaatcgcttgaacccaggaggcagaggttgcagtgagccgagattgcgccatggcactccagcctgggtgacagaatgagactctgtctcaaaaaattaaaaaaaaatcactgttaatattgacgttctcatcctttcagggtataaacactatcatattggtgatgccaacctccatatttgcttttcaccaggtgcaagcaaacagcacaaggacaggtggcaacaggctaaatgctgatgaactttcatgtgccaggctgttatttgggtggggggcaaatcaggaaggggcctgaggcacctcgtcattaccttatcttaccccagccagggccatagcaagggcccaggacaatcaagctttgaaaagtggacaatttctggggacagcagataggaaggggttcctagtcagaaatccatgccccttacaggaagtgagtttagttttctttccaggtcactgaaggacctgtgacagcctgaagacttcccaatccctacaccgccgtcaaataaagaacaagtaagatgtcctatattatatctatatttatgttttatatttgctcaagtcaaaaaacgatgagtcatcttggattcctctctccacaacataggctgagtccatccacttccctccctcttcagagctggaccgtcaccccctctcacccggactcagccaagctgcagtagcctcctaaatgacctcctagctctcctcctgccccacatgttgaccaggccaccttttcaaaacaatgaccacagcatggaaatcgggagccagaaatgtaagcctggcctcctcaggttgggtccccagctccgacactggccatgggccttaggcatgtctctgcctcagttccctcttctgtaaaatggggagggataatgacagtagccacttgataggattaccgaggattagatgcgtcactcatgcaaaacactcagaatgggatgagcacatgctaagcactctctaggaggtgccctctctagaacgctcccctctgctctacctcccgtcatgcttagaataaaactaaaattcctgcctcagcctcatctccttcccctcgtctctgctctggccagtctctgtttctgttgtgaaacacaccatgcctaggtctgccccagggctctgcgctgccgttccctgacctgcaaggcccctgccgcagatctccctgtggctgcaccttcaggtgtctcagggtccctcaatcaccagctatctcatcagcccatttatgatcatcagagcacccattccacctggtaccttcatgttcactgccttgtttaccgactgtctcctgactagaaggcgggcctgctcttcctacagtgaaggaacaccatatctgtttccttcaacactcccttcagggcctagaacagtgactgattttaggaaaagcacaataaatgtgaattgttttaatgaatgaatgaatgaagccatgtaatatatgttatggtgacatcatgatgcccaacccagagacacagacaccctttagcgctcagcccatgcaaggattgcctgtgccacagagagctgctttgagcagagggacactcattcctggggcagccctcacccccaggaattattagatcaataactaatttgtgtgaaggtgtgaaggcccagccgtctcagtacgacttgggacaactcttactccccactggacccctgtggggtcagctgaggctggcatggcaccttcgttgcatcctgacatctccctgtactccttcctgctcctcccctctcttccccagatgcctgtcttgagggcattccctaataaacatcctgcacacaaaactctatctcagagtctgcctcctgggaaatgcaacctgcaacacacatgatgcctgttaaggtgaacactggctcccatcccacctgggcatgcaggcaggcaggctgaggagatctacacagtttggtgtcttcctgtcctgtgctactgggtcccctcctctacctggactgactgcttttacaaagctggcacccagggctcttaattcaccctactgtgggggtttcagggcatgtttcctgagtccatcagaatccacacatattcaaatccactgtaatttagccatgtgttttctcccaactcatgggaagaggtccagggaccacctaaaagaccgcttccttctccaggctgctttcttattccctatcacccactcatgctctcccgcatctttttcctgcatccattcagaggggattcacaaaacatgctgagatgctttcaagtagtagtatgatccacacgctcttcaagccacatttttcctataattatggcaggatgctcagagccatttcttgggcaattctcagatactacagatgagctctagcttctgtcttgcagctctcaggaagtacaaatatccagatgctttattcgtgacattttggagctgcccagatgtgctacagcttcccttgtgcactcctatgcaccacagatgtgctgctacagagtatatgtgcattgtcttcttgaacaaccagtgagtctctccagcctgcaactggtgctattagtatcaaggatgaaagattgtgatctaagaaacacacgcacacacaccctggcagcagtagtgtgtactcactttcctgggttgaccatttatacaaacaccagcctctcagagcttagagcctcagcctgtccctggagtcatggggcatgtgctaggctccctctttgggccagggcagccatttcagcaactcttggcacacactgggcctatttggaccagcagctaagaacttagcctcactgtcaccatgcattatgcaaatgatcacataagccagaccatatcgtcagcaatcccaggtataaaacacagccttaaaacgtggctcagcatatgagaaccaaatagcgaacttaccatgggcttatgctgcagaagctggtgtctaaaacgaaaaacagtaaaatctcagctcctctcaacaactttccctgacaaccctcctccaatcaaataatttcatattcctccttccagctccccagagcactttcaaagtctctcaaccataatattcttggcatggtattataactgaatgtttaggtactgcgtttcaccctagttggaattccttaaaatccaccctctccgccttggttagcacccctagtggccagcaccgtgcctggcgtatagcaggtacccatgagagactcacagaaagaataatgacgttcttgattttgcaagaaaaaaagtatttgaaaggccttttgagagtctcaaaacaagatcatgtgctcacaagaaggcacagatgagacacctgaaaaatcacatgagcacccagaggcaacagcagcggaatgacaactgccctgcctggggacaacacccctgaccatcagtgcaactgcactatggaacgcaaaattcagggtctttcaggccttagtcactggaaggcccacaacatttacaacaaatccagttgcctaaataaacctagacaaacatcatctttgaaaataatatatcctagatctaaatgcctgaattttcagttagttcaaacagacttctggttctacaccagatcaacttttataaaccaccacatctcattttcatgatatctacattttgggattaaataaaataatggctaaagtgagcttttaaatgttttggagccatctagaataaacctgacaaaatagcattaaaaatgatcatgatggctgggtgctgtggctatgcctataatcccagcacattggaagactgaggcaggaggattgcttgagctcaggagattgaaaccaaactgagctatatagtgagaacctgtctcaaaaaaaaaaaaagttaattagctgggtgcgttggcacaggcctgtggtcccagctacttgggaggttgaggtggaaggatcacttgagcctgggaggttgaggctacagtaagccccgatcatgccactacactcaagtctgagtgacagagtgagaccctgtctcaaaaaaaaaaaaaaaacatgaagaagagtattagcaataaaattattttaaaacgctattcaccccatatctaagtaaaccccaaatacattttcttttgaaaatgttacagtgaagtttgatatctaggatattattgtttaatatttgtattaacaaggaagaagaaatcaagaataagtttatcaagtttatcactgaagatgatggcaacataagaggaaagggtgaaagttcatttatcatcattcctgtggctgctgcttggtattattaattttctaataagattttcattattttttaaagctgagtaacaaaagaaaataaaaatcaggcaatcatgctagattgaatagtgtcctccccaaaattcatatccaccaaggacctcagaatgcgaccttatatggaaacagcatctttgcagatgtaatttgtaagatgaggttatactggattaaggtgaaccctaaatccaattagtggtgtccttacgagaaggccagcagagccgggcacagtggctcacacctgtaatcccagcactttgggaggccgagaccggtggatcacaaggtcaggagatccagaccatcctgactaacatggtgaaaccccgtctctactaaaaacacaaaaattagctgggcgtggtgacaggcacctgtaatcccatctactcaggaagctgaggcaggagaatcgctcgaacccgggaggcagaggttgcaatgagccgagatcgcgccactgcactccagcctgggcgacagagtgagactccatctcaaaaaaaaaaaaaaaataggccagcagacactaaaatacacatagaggggagaacatcatgtaaagataaaggcaaagactggagtgatgcatctacaagccaagcaatagcaaggatggccagtggctcccaggagatggaagaggcaaggaagaatgcttttctagagccgtcagagggagtatgggcctgcaaacaccttggttgcagaattctggcttccagaactggagagagtaaaaccacccagtttgtggtaatttgttatagcagcctaggtaaactaactaggtggaaaggtctctatcctggcatctattgtattgaagacgactaataatataaatacacacaccgctggtaaagggtaagttgagttagctcttctgaatatgtattaaacccttaacatgtaactatttcttgatccagcaattctactttaaggaatttataaaaataatcagagataggaacaaaaaatcagctacaaggataaccaccacctgcttttatatcagtaaaaagaaaagtaaaacatgaacacaccacagagattatagcagctttattcataattgccaaaacttggaaacaaccaagatgtccttcagtcggtaataaataaatacatccagacactggaatattactcagtgctgaaatgaaatgagctatcaagtcatgaaaagacatggaggaaacttatatcactaagtgaaagaaggcagtataaaaagtctatgtactatatgattccaaatatatggcactctggaaaacgcaaaactgtggagatcactgtttgctaggggtggtaggaatggatgagtgaagaaagggaagaactggtagagcacaggggattttgaaggcaataaaactactctgtataatactataatggcagatacacatcactatccatttgtccaaacccacagaatgaatggacaacaccaagagtgtcccctaaagtaatctatggactttgggtgataatgcgatgtccatgttggttcaccagttgtaaccaatgtacctctctggtggaggatgttgacagtgggggaggttgtggctgtgtgggggcaggaaggcatataagaaatgtctgtatcttccacacaattttgctatggacccagtaccactctaaaaaatagtctattttttaaaaagaatgccttaaataagcaacaataaaggactaataaaataaactataatccagccaatcaatgggatgtttagaaaagaacaaacttagaacaatcatcaatcaagagagaacatgcaacgtacaaaaatcctaaacacattcacacaacagggagatggttgtagaaagtcaccctatttaaaaacaagatagaaacagatattaaaccactaaggtgaatgacttcatcaatagttagcatttcagaactccttcctgtattgagtactaatcatacccttataaaagcaaggagtcttttgttctccatttttaaaagctaatcaggaaaagctgtaatcagccaaaatcaaaataaaactatcagtggaagaaataaaatatggaaggttcagatactctaacatgtatcttcaagcatgtaaaagattactaagaacacccactttgtactctgatggctttgaagaataaaggggaggaaacaggctcaaaacacagcaagtaagacctgatgacacagaagtgagaatgttcttaccaaaacttgacagagtgctggagtaaattagcaaggatagcaggagtctctcttcctctctgctgattattaacaacaggatgaatcatttcctttcttggattataagaagcaagtctgaatcaattactcttgaagtattttcaaaatctatcatcatctaatattataccaagatagattcggatatatcctataatgaacattcatgcccaagcaacacatatatgtgtgcatgggctcaacacacacacacacacacacacacacacacacacacacacacacacagagaactatattttgcaattacatagggaaaatgtttaaaggtattaacatttgcaaataatattaccaacagtcattttatgcagtaacaaagtcagcggcatgaatatcatcttactgtcaaaaaaaaaaaaacagtatatggaatcatttttacaagttgaaaaaggtaagaagtgaaaataacaacaatggcaaaaataagttatgatctggaaaaaatgaaaaccattagaatttataaatatatcccgaagcaggctgtttagaggatggggaacacaacaaactaaaacaccacgggcaaatccacccaagattagaaagacagacaatacaagcacaaactgaaaatggggtgtaaacatagacaggaaagagttgtttgctttttaaaaaagtgtatttcaaaattctatgcaattaaattttaaaatcctgattaaatataagtgaccagaattgacttaagaacatatgaaagactcaataacaatggaagaaactgaaatagctcttcaaaattatttccaataaaggctccagactcagaccctggtagcgttgtgtgtgagtttattcaaacactcaaggggcagatggtttcatgttgtgaaaacttttctagattaagacatatggaaaaaattgcaatacattttgaaaacaaatgcaatctcaataccaaatctagtattgtgaggacaaaaaagaaaaactaaaagtcaaaactatgtatggacacacagcaaaaatactaagatactaaatacaatactagcatatcaagttataccaaagtctagaatcaaatagaccttataccagaaaacatgattagaaatattatgaaaaaacatacaaagatcatcaataggtcaaaggagaaaaattatatatcataaaagcaagagatgataaaaagtaattgataaaatttaatactttttttaaaaaaaagaatgaaacccaaactagaaagacatttccttaacctgataaaaaaaataatattaaagtaacagccaagatagttatggtcattattaatcactattatccaggaagttgaagccagttcaatgttacataaaacagaaatacactatacagcaactgaaaggaaaataaaaatattattattggcagatagtattatagactaatctggaaagcacagaagatgtaacagaaaaacgataagacaaataaaacatttagtatagccataaagttgaaaataaacatgcagaaatccatagcttttctgttcaccagcaattaccagtcaataaaaatagataataatagccggccgtggtggctctcgcctataatcccaggcaaggattcattcaatgaatccattgatccattgaattcattgattcatcctttgggaggcgggcagataacctgaggttgggagttcaaggccagcctgaccaacatggagaagccccatctctactaaaaatacaaaattagctgggcatgttggtgcatgcctgtaatcccagctactcgggacgctgaggcaggagaatcgcttgaactcgggaggcagacgttgcggtgccgagatcacaccactgcactccagcctgggcaacaagagcgaaactccgtttcaaaaaatatatatatatatatataatattttttgaacacatactaactgccagaaacagtgttaagcccttaacatattaactcacttacttttcacaataaccctatgaagtagataccattactgtccaccttttaaaggtgagaaaaccaagacttggaagaattaaatatcctgcccgaagtctcactggtagccacaacagaaccagtagtaggttctggcagtgtgaatgcagagtcctcatgagaatccattttaccatactgctcccaattaagccaaaaggtcatacaagctaaactgccaagaataaaccaaacaatagccaagaaagacatgcgacccatgcaaaaacatgaaaaaatttaaacttctacaatcacagaaaaaaaaaatcctatttgaacagagacatgtcatatttcacaataggaaaattgtaccttataaaaatgtcaatccccttgaaaaataatagatttaacacaattccaatcgcaatctatagagatagcatttatttttgttgatgctgtgttttgcttggagtgaggcggagtttaatgaggtgactctaaagttcatctagtaaaaatgtgagtagccagccaagaaattgcaatcatagatacaaaaatgtcctctaagatgctagtcactggaatctccacacttgggtccatgcagcatctcttcctgaccatcagcttcctaacagagttctgcctacacctttggtggctccttagttttaagaaaaataaaatacgtaagaaccaacaaaacctgagacaaggtatagataaagacaaaagaaaagatgctaaaatttaaaacagctcatgtattaaagtgatgaaattatatttgacatctactctttggccttcaaactttctttaacaagtccttatcataaaaagtctaacaaaacaaaaaagaaccaaagagagatgggggcgctggaaagaggatgataaatgtgaaaaacaaactctaattttacaacattctttcttctgttgaaaatgtttaatctggaaaatcaaggttcaggaatcattctgcagctgtgttaaaacaggaggggaaggcctcctaatctctgcttaagcataccttggggtccacttcagggccacccccttagagcaccaccttgaattcgtgcctttggcagtcccttctctaccacttagcaccaaattatctagcatcttgtcctctaattacgtgcaaacaggcaacgagaaccagcaggacctgaggccagcctgtctccagccttgcacagaccacaggccccaggggcccagcacccagaaagacttgatgattaagagactgcaatccagggctttgatggccccagcaagtttagggtttcaaaaaaggggggaaacgaccacatcaaaaaggtgacgattttttgactcagctccagagtttttaaatattatgtttctaaataaagtaaatggatactctagagaaacagctcaaggaaggtcacagagaggcacaactacttgagacttgataaatcaaataaacaatgaagctgagcaaaggaaagccgagagcacattacagaccctcttgcctttttgtttttccattaaggagctgttcttataaacaatgagcccattcaaaaggggtttaaaaaaatccctcgaggaagcttctatctcctccacccagagagctgctctccctttcctcctgcctgtgaaagcctggcctccaggaacacactctgcctgagctcggaaggacacacctttgatctagagttccaagaaaaaaaaaaatcctgactcaaattactcaggaattctattggtagcaaaaggtgagagaaaattaaaagtctccacataaaattaatttgttctcaggtgggacgttttctcccatgcccagcaaggagcagaggtttttgtgttttatgactttgatgaagaactatctgaacacccacatccacccaaggcctggtttctgaatgcagctcctttttaactcaatattacctgtggttttctcatggtttcctggatataaatcaaacaggcagtcagcacagaccccatcccatcttatttttatttctttaaaaaataactcttgattacgaaatattccaacatacagaaaagtactaaaaaggacatgctagttatccacgttacctacaactcagatttaaggaatgttagcatgttcccatatttgcctcagataactttaaagaaaataaaacagataccgctaaagctcccctcctccgtcccctgaaaacgtactccctccctctccagaaggacaaaaatagcaaataatgtaagtcagtatgtacatttcctgtggactttcgcttttacttttttgcccatgatgatagtatcgatttttgtattgtaaaaatgcctgaaggacagttccttgcccctattcccagcccatatccatttcatacagcaaactgcttgcagaaaaacctttcagctcacaccaactctatttgtcccagtattgatcaacctcatcataggtacacagaccacatcaaaatgaggacaataagcttagaggataattaattaatgaaacagactcatcaatatttacattaagaaaggacagggccaaactttaatgtgtatagtctaggaagagtcaccatattctcagttagccaagctcccaggaggcagcactttttgctctatctgctttcggcattgttgtcccaaggggttcaggcctacatccaacttttctggctctgcttcttggacttcatcctttcccaattaacatcaacagttccaactcaagtctcttttctaagtttctgagctttatatccagccacttggatgccctccagcttaacctgacaaatttggggtcatcattgtctctaaatctgctctactcccgtctgtcttagcgaacggcattccatctacccatgaagccctagctagagaaccaggtagcatctttgactctccttcctccatccccagagtcctactaagccctgtcaattttaaactaacatgtctctaatgcatcaacttctctctctgtctctttttttttttttttttggagtcggagtttcactctgtcacctgtcacccaggctggagtgcagtggcatgatctcggctcactgcaacctctgtctcccaggttcaagcgattctcctgcctcagcctcccgagtaactgggattacaggcacccaccaccaggtctggctaatttttttatttttagtagagacagggtttcaccatgttggtcagggtgttctcaaactcctgacctcaagtgatctgcccacctcggcctcccaaagcgctgggattacaggcatgagccactgtgcctggcctctaatgcgtcaacttatctcacccccactgccaccaatgaagtctaagccatcaccagtctgcacttgagttaatgaagtagcctcctaatggtctcctgtcttctgtgttgccccactaacctattacatacactgtagcttgagtcatataacaccaatacaaacctatctcccatccttgaacactgtcatgtctgccttaaggataaaatgaaacagggcttcttaggcattcataagctagactctatttagccagcttcgtcaaaacataccacctcccacttccattccccagtcccagtaaggtgatttcaattgcttgatatacaaggttcccttttacctctggaaagtctgcccaacaaccccgtttgtctggaacataacctccctttgtacctgcctcctcacatctgtttttacagtgctttttctgattctttcataagtttcagcttgcatacctcttcttccaggaaatgtccccagatgcccagctctgttcccaatggtgccagtgcccccactaggtcctctcatatccctgcagtgttgctctattgcggcaatcatcacaatttattagtatagcttatttaataatcaagcttcaccaccagaccatctattccctaagggcagaaattatttgtttaattcactccctcagtacttagcacagtattggcacataggacatacatgaaaaatacctactgaatgcatgaattaatgggtggatggacagatgagtaagtattcaataaatctggtttgctatcttcctctggcaggatagaagggccaaatgagcagacacagtgtgtcagtttctatgtatcttggctctaactagaatgctacaattaaatgtaattccttttttgatcatttttcatacatgactttgttgccaagttgtgcaggtggagtgtgtccaataaggtaaacaacgttaaacacaaaaattaatggggagaaaagcaaaaacagcctcccctatcctcactaatatccaacagtacataaataaataaggtggatccccaagattcttcagaagacaatgctggctctcttcatttactcatgattaaagacattttcatggtcctacaaaatgggaaatatcttttaaagggacctacctctcaatgcaggtacatcgtaaatctcttttagcagaaagtggtaaggaaacatagttggattatctaggctagagaatgtcagtcagctctttgaatttcaactattaattctcaccagtgttaaataagagctgcagaaaatgtggatgggaggggccagctttacaggagactaaatattttctctacctacaaaggcgtcctgattaacgttgcattgcagaagatgtacctcccaaaaaagatcttttaaaaatctacgtgtaaatagaacaccaaaaaatatattacacaaaagcatccttcagcatccccttttaaagcattaaagattaaatttatatagatttttaaagaggtcaccacctttgttacttaaagttcacactataagtttatcttagttccaccttatgaacctggtgaagacaacactgcttctgacatgaagattccaaatttcctctaaaatctctgttggtacacttgacaagagatcatcttcaaagccgtttcatgtctcacttgagatgttaaaaaatgctggacctttctaatcaagagggaaagaaaaagaagggaaggaaagcagaaaggataaaagaagaaaaggaaatgtatctgaatattggttggcagcatgtttacttatggaacaaaatggtaaagaagccatcaagtagtatttctcaacagaaaggacatggacagggaatcgacaatgtcgtgtatacatcatgtgcttcatttctattactcctgatggcaacccttcaagaagttttatcctctggattttacaaataaggaaactgaggcctacaatgtagccctgacttaggccttcctggcccctgatacttagggcaggacctgaactcacatccgagtctggctgtctgcaggacccccgttactgactgcttttctctactatatgtgtccctcttaacgtcatcaagtttaatcggcttttcccagggtccctagaaaaatcaagtcttcacaacctatcaacagctatccaagatctatgcagctaagagtaatgacataaaaatcactccatttttaggctttatttaatacaccaataccaaccaataggcctcaccttgtggataccaagatgccccggcagaagttacagagttctgacactatggtccctttctagagaaatgcaaggatattaacttgggcatcctcttcttattttaatcctctgactaacacaatcacagttaaaacaacttgctcttagagagcagggggagttgaccactggatggccttggggccatatgttcaagcacactctgaattcctcttcattacgtaacttgaaaaccaaatgaaatgtcgtgctactggagcacggagcccttactcagtacagagaaggatgggggcctttgtcacctgaaattcaccactttgctatgttccggtcagcgggaggtacagttcgctactcacaggcctaaaagcagtgtcgggcttagctaccccagacaggagagtcagcgcctgctcatgcattgagactgaaacaatggtctgggcgtcacagcagctgtgcaaatccctgaaaattcagtccacgttaacgcaaggctctcgctctacataaccttcaggaagcccacgttgatgtgtttaaagggaaccagtcaaagatggtgaatcagactggaggcagggagcagagaatcatgattcgggtacatataggtgtggccgccccaaataaatggcccaagcatctactctgcaaacgcatcttaacccaaagctagactggagcattttattccctgaagggagtaaaaattatcctaaattcttccaggtgtggcttaaggtcatttttatacctactcattcattccacaaatatttattgagcccctgcactgtggcggcccctgttccaagcactgagacactatgtgaaggacacaggacaggctcatggttcttacattctgcacagagacagaaagtaaacacgcaaatgtgcaaaaaatggaataactgcattgagtgattggttccttaaaggaaaaatgaagggaaatgtgacgggaagccctgggccagggcaggttcggagcttcagagaggcagtcaagtgtctgaggctggagagtgagaaggatccaggagcacaagcgagaaaacactcaccatgaggtgagctttcccaactccactgcttgcctgaggagccgtcctgagatctccgttgcagagccaatcctggggatgctgagctccggggatgtgggaggactgcatgactgtactcacaggccaggacaagttctgtttattttccaaacaccctctacctcatctgaaggtggtttggcaagacctggaatcagggccttctaggcaaatggctgtgaccttcctaaaggtatcaagactgtagaacttcccttaagggattaatgtagtatctaaaatttttaaaaatcagtacttccctctagggcgcaactttgatacctccttgagatgcatatgcacacacacacatacacacacacacacaaacacacaggcggcacacacagattaactctcttgcagaaaaaaaatgttagatggtggcactttaaaaacaaccagatgagacataattaatggtgtcaaaaacacataacttaaaatactcaaactctaagaaaaagtttcttttttttttttttaactaaaaagaaaagacttgggacaatttcactgccaactaaaatgacaaggcattttttccccaaaatttattatgatgatagataacaaatggcatctataaagcagtcagttaacaacgagaaacaaaagaagaatacactgagaatactaggaacagagttataaaaatgccagttagacatgcaagaagcagcagggctttgaaaacgcacaaagctggatccaaatgttagatgtggttttagctactcaccgcaaagctgggttactaacatttctaaaatttctgaaaatgattttcaggcctctagcctgctttggagcagatgaaaattttccattgttgatccacagacattagtatgcaaggtaaataacaggcatcaggcaagatatctatttctaataagtttacagaaagcacattaaaagcccgttagaactctgatttacctcaatacacacaggcagaaaaccagagtacgggcacacaagcaggactccccttccagttcccctgtctcaccaagcaggttacagtcccagctggggcagacagctctacctcaactgctttcgtttttacagtgagtttttatatgcaatggttgtcatgcaaaagtagaaggtgaacaaaagactgtatatatgtgcgtgtatgtgtgtgagcacacgtgtgtcctctcctttcaccttagcctaatagctggacaacatggtgagctctttgagggcaggagccatgtcctatcggatttatcctgtgatgatgggctgaggccaaggagaagatatttaataaagataaatataaagacctatacctggccaggtgtggtggctcacacctgtaatcccagcactttgcgaggtcgaggcaggcggatcacataaggtcaggagttcgagaccagcctggcctacatggtgaaaccccgtctctactaaaaatacaaaaattagccaggcatggtggtgggcacctgcagtcccagctactagggaggctgaggcagaagaattgcttgaatccgggaggcggaggttgcagtgaactgagatcatgccactgcattccagcctggacaacaacagcaaaactctgtctcaaaaaaggacctatacctaaggccaaacaattactactcaagtcattttcagcaaagaatggcagaaataagacttggcagcaggtaggaaagaatacctaggatatcgccttccgtcatggaggtcacggagagtcaaacagctgtgaaacctggtttcctaattcaatctatcccattaacaggaatagtttgctctatggtgtatccaccatgccaagcagcccactttatcctttccaaagggaccatatgtccaggcccaggtgaacagacagtgaacattcaaagccaactcagacaggaaaaaggtaaaaggaatgaaggaaagagactttgaggccttatccttcaaatatttgtaagtacttgcggaagaagaattagcactaactcatgtagatgcagaaagccagagaacgctccactacctcccgtatccactattttaaagtgcctttgaaggacaccaggcaaggaggggtcaggcagtgttgaagtgatggggaggcagatttttgccccacacaagaaagagtgataaattatatcattttaaaaataaagccagcaaaaacagttttcttgtgtctgaacaaatgcttctcattttggacaggctggtctggcaattcctgttatgagaaggaaggtcaggcttcaagtcttatcctagctccctcacgacttcttgggcactgtgggcaaatcatgagacagaagactctcctttagtcaaaacttttcagaaaaaaaaaataggcatttatatgtggattggttaaacctgagcctgtgcaaaaacacaggacagactgaaatgcatgaaaaccatttctaggagaacagaatgctgcctagtggacacactctaggacttaaacaataaaattatgtgcaatttagttttaagtaatattaaaattcagtacagtagtccccccttatcctccacagatacatttcagtggatgcctgaaaccacagatagtcctgaatcctgtatacactaagttttttcttataaatatatacttacgataccgtttagtctatcgattaggcacagtaagagattaacaacaataactaataataaaatagaataattacaacaatatactgtaataagttatatgaatgtgatatatctctctctctctctgtctctttctgaaaatattttcttgtactgcacttacttatttttggaccatgattgaccatgggtaactaaaacctcagaaatagaaaccttgggtaaggagggactcctgtaataaatgtccaaaactgctgggcaattgacagaatcagtccatcgggtagaaactgttactgccacagctaagggacaggttaagtactttattccaagacccaaagctagtaggtggccacaaatcatgatatagaatagccctcacatacacatagacagacacactagcgcaaagaaaccagaagtcactttggggctgtactgtcatgcaaggatgggaacacattctgggaaatgtgtcgttaggcaattttgttgtgagaacattatggagtgcatttacatggacccagatagtagagcctactacatacctaggctgtatggcatagcctgttgctcccaggatacaaacctgcatagcatgttactatactgagtactgtaggcaactgtaacacaatggtatttgtgtatctaaacatagttaaacataggaaaagtacagtaaaagtaccgtattggccgggcgccatggctcacacctgtaatcctagcactttgggaagccgaggcgggcagatcacaaggtcaggagatcaagaccatcttggccaacatagtgaaaccctgtctctactaaaaatacaaaaattagctgggcatggtggcgtgcgcctgtagtcccagctactcaggaggctgaggcaggagaatcgcttgaacccaggaggcagaggtcgcagtgagccaagatcacgccactgcactccagcctggagacagagcaagactccgtctcaaaaaaaaaaaaaaaaaaaatacggtattataatcttatgggacaactgtcatatatgcagtccattgttgatccatcatcttcatgtggctcatgaatgcatttttttaaaaacatttaatacttaaaactgatggtaaatgaaaattataatgggattccaaagatagaggcattggcccctctttggtctgtgttctctccaaaaatctgacctcacctgaaattcatagaatctgtctctctctctctctctctctctctctcacacacacacacacacacacacacacacacacacactcacacacacacagggcaaatcagtatactacacagactcactaaacatgcttcctggttctaaaaacatgtaagacagcaattccactaaaactagtgattaatatcagagcagtagtcagtatcgattgtattcattttatgtcaatgatcaggtagcatcactaagaacgaaggcaaggttatgggtttcatgtccacaaaagctatgttcgtaaatgccatcttgcacaaataaatggctaagtgccctcacaagcatgcacatcaccaggctgatgggctgagagcagccaggtgaatgcatcgtcttttgccagtgtcctccaggcccccaggctgccatccttaacttaggacagcctcctgttttctccgctctgttagaagctgcagtgaatggacgggggtcccactgacgtcatcataaaaccaccacaccaacctcagggggcccccaacatgactgtaagtcccactcttatgcactcagcatcttttcccattcctcacaaagacagttcaaaatattcaccattcctaaacccaattcttctattcatatcagccttcacaatctcatgctaaaaactagggaaaggaggagctgaccatgggaggcatgaacattcccaccccagtcttgaagaacaagtgcgagggggctctgatttcctccctcctacaaattgttttatttatttgtttgtttacttatttattttaaattgacagaaaaaattgtgtgtatttatttaaacatgatgtttgaagtatacatacacacacattgtggaacaattaactctgcttaattagaatgtgcattacctcacataattatcatccttgtggtgaaaacatttaacatccactctcagcatttttcaagaatacaatgtagggtcattaactatagttaccatgccgtacaatagctctgttgaacttattcctcctacctaactgtaattttgtatcctttgaccaacatctccccagtcctgtcccccaagtgccccatcctctggttacctactaccattctactctctacttcaattttacctcccacatatgatgagaacacatgacatttttctttctgtgcctggcttatttcacttgacataatgtcctccagttgcatccatgttgtcaaaaatgacaggattgccttctttttaatggctgcatagtatgccactatgtatataacacattttctttctccatttgcccatggacatgggttgattctgtatcttgcccattgtgaataaggctgcaatgaacatggcactgcagatatctctttaaaatattgatttgaggcttgacatggtggctcatgcctgtaatcccagcagtttgggaggccgagacaggcagatcatttgagaccaggagtttgagaccagcctggccaacatggtgaaaccctgtctctactaaagatacaaaagttagctggatgtagtggtacaagcctgtaatcccagctacttgggatgctgaggcaggagaatcgcttgaacccaagaagtggaggttgcaatgagccgagatcgtgccaccgcactccagcctggggtgagactccatctcaaaatatatatatattactctcttcccaggcctcctgatcacattcattctccccactccaaaccatttttcccactagggccgaagggtagtttttaaagcagatggtatcccaccactctgctcttcccactcacatgaaggatggagcccaaagtgtctagcatcgccttcatgggcctccaccaataggactcatatacctctccattcacattctctgcctccatcctcctctccccaaaccatgcctatccaacaagcaacctaccctgattggtaccatttccccaaaccaccgagaatgctcatgctttaagtatttgcttctactgctctctcaacttacaatgcctttctccagcccccagttcccactcctgtcttccccctgccatcactattgacatgtgaaggatttaactcctcacctcttctgtgagactttccttcatactctatagatgttgtttacattgcacttaataagtgtactgaattttgctagtttacttatccaattataaatatcttaacagcaggccccacattttgttatcctcacaatcaaataaagtgcctggcacttagcacagcctcaataagtgtttgttgactatggaagcacatcagtaaaaataatccttacacttataactgcaaaggagttcagaaaatagatggtccagggttttctatattttatttccctaaattctgtccccaacctctttctgagcttgattccatttgagtatgctaaggaaaaaagaaaagttcttatgagacagaattctcctggaccaggtctagacatgaaaagttctattgtatgcacgacttccccgagactctccttcgggaaaggaaggaagttcaaatttctctgtgggctggcaaattttctgtacttattgacatggctatgataaatttgtatctcctcagacaaaaggccaaccaaacgctgcatgatttaaaatttggagaataaacaagagccatgtctctcaatgacttccaaaagctttcagcagcaggttgtgggtgtgctttcaagtgtacgaagttgaggcttaagaaactgctggaattacacctcagacggtgacacttcttatctttgaagggatgtatagcctgctatgtggtgttcttaaaggtgtttgtgatactttttataagaatccacctcatacatacgcatcctagcaacataccatgtacggaactgagaccacatcctacacataccttctctctttgatttgacaaccagcattatcttaagtctggcacctgtaagtcattagttgactaaggttaccctaaagttagggtaacttaaggtcaagggtaagagctccaatattcctttggccttttccaccactattaagtaactcccagcaacaacaaacaaataacaaacagcctcaacccactcctaatccttgtccttggcactgacagatttcagaagaaaaagtcaccaaacaacagatgccactctcaaagaacagagagggcagctggtgtgacttaataagcatgcagcccactgtagagaagctggagaatcgtacttttcctgagccaatataagaggtgtttacattaaccagagtactcatcaacgtacctgcaactttcagttcaagacagatgagacaaaagtaaaactaaattgcttccagaacatgttaaagtataaaaggtgaaaacacagcaaacacctgttaggtcttgccaactgttatttcctacgtattttcttataagtgacagatttttttaaaacacttctaaagataaatgcaaaatgtaaacaccaaagcaagtgtgcatttgtgtggctttgatatacgcctgggaagagagtaaccttgtgagaatgccacagaaaaacgactaagattgcttcccacagccaatataattacaataaagcccaataagttagcttaatataacaccagactaaattctgaaggggttaggtgcagtggctcatgcctgtaatcccagcactttgggaggctgaggctggtggatcatctgaggtcagaagttcgagaccagcctgaccaatatggtgaaaccccatctctactaaaaatacaaaaattagccaggcgtggtggtgcatgcctgtagtctcaactactcagtaagctgagacaggagaattgcttgaatctgggaggtggaggttgcagtgagccaagatagcactactgcaccccagcctgggcaacagaacgagaccccatctaaaaaataataataataataataacaataataataataataaattctaaagggatacttttaatcatgacgtatttcagagaataacataagcaacatctaggtatccgccacacaggtttaatacatgttaatattttgttacatttgcttaaaacctcttctctttaacgaaataagataatacagatagagctgaaccctctccatcttgttccctttccactctccccagagttaaccactattaaagaaatgattatatccatgcatgtttttatactttcacttcatacatatgaattcaataagtaacatagttctacaaaggtgttcctcaagttcagctagaagaaaaaatcgaatagaagccaagagccatttgaaaaggaagaataataagagataatgtgcattatcagataaaatgtactctgtgtataacatctgaaagagtatggtacaacaaaagaatagacaggttgatcatacaataaaattttacagaaaaagaacctaaaatatatattaaggcagtaaccaatgcaggtatcacttcaaatcagtgatagaaaaactggtaaacaattatctacccacaaagaactaaaaaattttttaaaaaagagacttcaacagacacttcagaaaagaagatatccaaacggccgataaatatcttaaaaagatacttgagtccctcagtcatcagagacaaatgaaaccacaactggataccactgcatagcccaaagaagggctacagtgaaaaatacagaaaataccaagtgttgacacgaatgagaagcaagtctatacaaccccttgggaagagtattaggcagtgtctactaaagctaatatatgcataccctaggagacaataattccactcctaggtttatgcccaatagaaatgtgtattcagatccaccaaaagacagctacctggcagccaatgttcctgacagccaaaccctggatgccacccaaatgcccatcagcagtagcgtggatcaacagagcgtttctttcttgacctgggctctgtttacatggtgtgttcattttgagaaaattcatcaagctgctcacttatgctatgtgactttttaatctgtgtattgtatttcaattaaaaagtttaaaaagcgaggtaaggttttcacctatcctatcttcttttaaaatatttcactaatgttgatacgtgtttctgaaaatgagcactcacataaacagctgatggaaatataagttgctgtgtttcttggagctaattgggtaagatgtagtcaaagcacacagtttttttggaaggaatttcatcacatcattattcacaattgaaaaaaaatgtgcatgtccaatgataggggattgattgagtaaattcatagctattaaagccaagttggagaagagtggttcatgacacagaaaatgatcctagcatatggttacctgaacagagagaaagactgaaaatataccaaagtgttaacttttattttccaagtggtgagattccaggccagcttcgtgtttttcttttatgcttttctgaatttcccaatgagcaagtattcctttcataaaaataaaagcacagccgagcacggtggctcacgcctataatcacagcactttgagaggccaaggtgggtagaacacccaaagtcaggagtttgacaccagcctggccaacgtggcaaaaccccgtctctactaaaaaatacaaaaattagcgaggcgtggtggcacgtgcctctagtctcagatactcaggaggctgaggcaggagaatcacttgaacctgggaggcagaggttgcagtgagccgagatcgcaccactgcactccagcctaggcgacagagggagactccatctcaaaaaataagtagataaataaaaataaaaataaaaacacatttaagacagaggagagcagggaatagcatggatgggtctaaggtctcaggctggagtgagcaggctatgtggccttcagtgaagtcagaggcgtcctgcattcctggggctcctttaggctccatttttactggaactctttctaaaatgaattattttaataatttctatataataaaccatctaatcttcgttagatgatgcagcaccttctccaagtgtccctgtgaaagtttagtgcccttgcttcagctgcatctgaacgctgctgcctaacttttcaataacaacgttccccagctcccgcctgtaaatgccaatctgaaagaataaattacaaatatgggttacttgagaggttcagtgtttaggggtctggtaatcaaagtttattgtactcttggttttgtttcttttttccactccaaaaagtttaatgcaactaaattagcatcaaagaaatttgcaaaagctctaagtgaagccatgatgaactataactacataaaaccagatgccaaacagaaaactatgcaaagcactctatgaggatgttcaagaggtttgaaagagggccatgatctgggaggagttagtcacacaagagtccaaaatgttccttctggctgccacacacatcttcttccaggaagatgagtataggaagcctggtgggtaatgaataataccaagtctaaatcaagaaaacacacatttcagatttcaaaggatcaactgctgttgtggcagctaattgtaattatcagcaattcagccagaattgggcaaaatctccctgaatttgtacctgaaacttttatctgtagagtacccttcaaaatacttgcaattttttttttaatttttattttagagacagggtctcactctgctgcccacactggagtgcaatggcatgatcatagctcactgcagccttgatctcctggttcaagtgatcttcccacctcagcctcccaagtagctggtactacagccaccatgcccagctaattttttaataatttttttgtagagacagggtcttgctatattgcccaggctggcctcaaactcctggcctcaagcaatcctccttccttggcctcccaaagtgctgggattacaagtatgggccaccatgcctggtctctggaatagtatttgactcaacaatgtgatagtacattttggcctaaacaaaatcttcagtggcttttaacccaagatggacccatacatgtgatgtacacagcttaatttaaaaggaattctgaatttcctgttctaaacttaaattatattaactcattcttctccagctccccttatttatgggacatctttcctttcatttaacattctgcaaaattcctgtggaaattggagcccctgtcatggagacttgaatatcaagaatatcaagggagagagagctctttaaatcatgtgacccaagtccttcgttttcacagataaagtgatgtgcaggcagaatcttttgaattcttaatgtgcaaccaactacaaaattagctaggctacaactatgtgatcacatcatgttgtatatgagaaagactcagctccacgtttcctaatcactgagaggttctctctctttttttttttttttgagacagtcttgctcttacagatcatcattcctccaaagagaattctaatcatttgacctaaattttccaagtgaaagttagagctccaaatactccctgtaaaggagagcctctggcaaatgctgggtcatacatctctttaagaatctgaaaaaaaaaaaaaaaaaaaaaaaaaaaagggcataggcccatgtccataaagtgccatgtaaaataattccaaaggggttcacccattctcagatgcctctccatcaaggtcaagggttttgggattgctggtgaagacgccccgctgtcgaacatggttcatttcccttagatttcatattgggcttcaagtcgttgtcactgtggtcaatggtatttgtttacggaggtaggagctaggctttcctagagcttgaaaactgacattatcaccacaagagagaatttctataaaaattgtactcttgtttttaagcacatataatccctcacttctattcaaaaatgaaagccccccccccccccccaagttaaaataaggtacaaagttatgctggcgtttacctgtaagacttgtacttgtattattagtataccccagtattataaagtttctatatttgatagagactcactttctccccaccaccaacctccctgcccccagagcagtgtgaataccagggatctagtctggaatagtgactcagcagtattttgtagcctggtcccagctaatattatcacttctttattaagaaagggtttttctcttctacccctaactcgcaactctgaactttttgaaaaagtagtaaacgaaaataaaacatgctttttaaaaatcatatctttttttttcaagaaaaggggagtgacaagagatttgcaaattatcttatctctctctctccttacaatctgttgttgttgaagagaatcaaggcagagatactttgcatgtatccagatgaaggcctagcaataggtacgtgtaggaccatgtttcctcttcaatctagaaaaaccaacaaactaccttgtgctaagccaacactagtcactggcaagaacaagcaacaagagaaatttttctgctgtaacactgcaccagcctgtttaatccttggattccccaatattcagccagtatgtatgctgatatgtgtgtgtgtgaatacacatgtagacagacaactgagagatttataagtatcttttatttttccctgagtcatccagttttttgggccaaacagatggataaaaatattctaattttgtacgaaactgatcaaagaaagtgctttgaatttatgtgaaaaagtttcccattaagacggtagctatttttttcaagcatgattctttttaattgcggaaaagagccgaaaggctttgtcagagggcacatgttttctataaatcaaaaggtaaataaatgtgagattatttcactgggcatacacatggtttttgctaagtaaactctatttataaaacattgttagcctacacaggaactgctgtcaacgtttataagaaaggaacttttctactgctctcaaacttgccaggatttgaaaacaagcctagaaacattagtattttaggaaagattgaatttaagcttaatgtgaaatggaccaacgtatgttttctggtttttaaatgcttggaacaaatcttcaattgtatattagcttcatattttaccagaaaatgtttacattgatgtaagttccattatttcaaccatgccattgttctaaatctttctggaagttctcttttggttataggtaagggtctcagattatttttcttatcattgccactaaaacaaaaaatattctgtgaaaggggagtcttcgacattaactaagcctagtattcataactgccacgccatgtcctcccaaaggttcatttgcaccatctcttctctttattatacccacccttgaccacaaacacatttatcagttctgctcagagcagtcctcaaaatgaatttgctgtgaaaggaattagccataagcaagcatgaagcaagagtcctagaaaaccaacagcaaaccaataaggtaatggtaaccttaataataatttacattctccattttccattcaacttttctttcttgagctgcagtgccttccaaaacagaatttttcccaatgcttttgcaattgatccctactctaggtggatgtaagccaatggttacagtcgtgagcagttccagaaagagacatctcgctctttctctctccctcttgctttttattttttcctttccagttgcgtctttcccaattgtaagactgtcatctcttggcatgaaatgcatttgtttttatttttaaagataaatatgcacacagaaatgactcatcctcttgaatgacaaggggaaaatattaggtagttccacaaaaataactcaaaggattttaaaatctgcataagaaactcctgaatgtccaagttaataaaacacttaaatatattttaggattatctaacatgtaatctgtatgtgattaaactgctttggaaacaatgtaaatatcttcacacccacatatttttcccaatttatatgtcaaattccaaaatatttaacccaatttataaagaagactccatttctttgcaatatatttaaaagggaaaggttgcttataaaatgtaaccatggttccaataagcttaaaaaacagtcatagatgaagaaaaacacaattattgtctgtatcattcatttttctaattttgcggattgagagctagcaatcctaatagacgctaatgaatttgaaattataaggaaaggccgagttctccagaacttctgctcctaatcaatcagcagagatcagtgacatcattagcgcctttgatcacagctcctctttcaagctcagatgggatggattgatccttgctggcacagagaatggagaaacacctaggaatacaattcactgtgaaacatgagaggtcatcagcatctcttcccttccttcaaggggaacagagagcgcattccagagcagcccaacaccaaacaatagagccacctcattaaatccaaacctaattcccgtctcatcttcctaggattcctaaagcactttaagagaggaagggatgataagctacttttctttcaaagaacctaggttacgagcctttcagtttgttcttccttacccaacatacctacctggggctggccccaaatcccgtcaccatgtggggagggaaagaatctgtggatttttttctcccattttccccattatgatgcgcttaaacaaagcagaacttccccttctacttctgaattttacataatgaaacaagtaatatttgagaaataaaattttacttaataaaactgccagctactctacattggccaagaagaaagtccttgaatataatgctgaccactacaatttcaaaatacttgcactgcagtcactcagcatgttctcctctgaaatggtcacttcgggaatgaaaagttttaattgaccttttctacatttattccatggttgttttctccccctccctatttgtaatagcagtctaattgagtttcgtgactggtggtgaaatgtagtttattatctccctcatcaggtgatcaatgatttcattaataagacagataacaaaactgtcatatcatcgacactgttatgaaagatgatcctagctttctgctccattttccaaggtctggggttctctgtggcagctctgagtccattcaatattttccacagacagagaaaagtgaaaatccattttgaaaccaatttcaattaggatccagaagctgttatcacaggtgtcgcagaatgggcccgtaagtggaaatgtcgcctatccattctgaaatgaaaccttatcaggggctacaaagatggctggggacagcctatctgtaaattacttttcgtcctgtgttaactcaaccttagttgtgtcatatggaattctttccacccactagtaataatctaatgactaactagacacagcacccaaacggctttcagccgggcagggctgtccccagaaacccttaaacatgggtacaaatgcaaacacactcgggcctgcaggcgagcaaagggacaggcatgctttaaatgatagaactaaaagtttattatgggaaataaaagaagcccgtctccacccattgcattcctggtgatttttcaattgcaaactccaaggccccgttatttcattaatgcagcacccaagtagtgaggcttttctctcacatctttcagtctcgttttagcaaattatcccatgacggcagatttattcagtcaaagacctcggactttgagagggaacaaaagaatcaagagactttctggtccacctgcctggcgaatgatgaggcagggaaaagtctcccccagagaaaccaatcaaaccattgtgtggcacagtcagaccttttcaactgtcaagccagagagcagggaaagagatgaaagaatgcgggatgaagctaccatttacggaaccatgtgggaatggtctcctaagatttaataattgggatggaactcaactttctacaactaaagaaaaaaaaaagagacaggaagaaagagaccaggaagaggaaagagtcgaagaaagggaaaaaagagcaagcaagaaaaaaaaaaataacagcctaaattgcactaggaataactttaatacaaaaattctgtctacctgagacaaagtccaatctatataagtaaagaagaaaggggaaagatgcttcaaaaaaagaaaaaaaagacaaaaaaaaaatagcaaagcatttgctattttccctttaggttatagctgcattaagtgttcagattctaattttctcatgtaattaatttaaagtaacaaaaacaataactaaaagccctttaatatggctgtcttgtagttttaaacataaaacggaattttaaattggcctaaaatgtacattcactggatgctaaaaaaaaaaaaaaaaaaagattcaaaatagcagatgctttaggttgtagatttctgaacagttttcaaaaagattttcgttctactacaaattcgacataagatatttaaatagaagaaagaaactaacactaagttttgctaacaggacccagaagaaacaggttttttgtttgtttgtttgtttttaatgtgaaatgaacacagcatcaagcagctactgaagttcctatgctttctatcattactggggactcacaccatatgcgttactgagctgagtttaaagcacaagtggtggtcaaaattttggggaggtgctggaaccgttctgtgtctcgatggtggtggcagctatgtgaacttacggattttcaaaactcatagaacggcacaccacaaagagtgaatcttactgtatgtgaattttaccaaataataaactaaagcagacatatctggaaacgtttctatgtaaacaaggtaacagggagttttttgcttttactatcacccagtctccccaaagctgcctggaaaagcaagccctcctcgaccttgggggtcagagcaggaggtggtgggaggccaccaactacctctccagagggagattttcctcccatcatcaccatttcgccgcttaagcatccactatttggtggttgtttctggttctgagcagcttgtttctggaaatttgaaatgttcacaccccatgatcacatgtaatcaaaggcaacccagaaacatcccatccaagcaaaacatcatgctgtgacttctttttgctcttaaatttgaaaaatgggagtgatatttattcctgatttatctgatattcatttatcccaggaattgttctttttgaggagaaatccaatagctaaaatcccaacttgtgccaatttcaggaccagtgatttaagatattgttccctaactctagcctgttaagctagaacctgataaccaacctcatgtaaggatctcctattagccaatccttcaatcctcaatcctcaattagccaatcctcaatcagactaaagccgaaccattcagagaatactaacaactgatgttatgctgaaaggagtgagatgaaatgcatcaataaatttaatcctggcaaattatacccataagagtcatattactattactatcaatagctaacatgtttgggtactctctgtgccagagtcagacaggttaagtacttagcccatgatcacacagcaattacgtggtagggatagggctcaaaccctggcttctaactgcacaacactaatgctgttacacatgtcccctgccctcctgtctcaaagtgttgtaatttgcaggtttattcagtatctgctgaggccctctcagcaaacacactgaatgtgagcagggagcgggtaaggtagaaaaaccaggtgctactctcaagaagtttaactaaaatgtaaaacttgagtgctgtgaaggaagggacaggataaactggtggagcatgagggatctttagagcattcaaagtattctgtagcatactgcagtggtggatatgtgacatacatttgtcaaaacccatacaactgtacaacagagtgagcccccatgtgaatgatggaaagttaataacagtgcatcaatattggttcatcagttgtaacaaatgtaccacattaatgtaagatgttaataagaggggaaagtatgtatgacggggtatatgagaactctctgtgtcttctgctcaatttttctgtaaacctaaaacctctctaaaacatgaagtctattacttaaaataataataattttaaaaataaaaaaatctagtgttataagctagttccccaaaggacacaagaccttatgaggagagaaagagactggggacatattcacatttgagaatttaaacatgcattggtgttagcaaaacatttctatggacaagaggccaagagcccttgcatttagctaaagcataggttatgcgatgggatagtagcatatctacttctgaacatatcagattggactgtcagactggggccagattttagaagatatctaaatgttaagtcaaagactttgagctttattctacaagtagctgggagtcactggagcttttagagcagggttgtggcataagcagaactgtaataagcctaatttggcaggagcaagtcccatgcgtgacaagagtggagatgaaaggcaaggtgattagacagagggtcattttaatcatctaagcatgaggtgtgagggttttcaccacacagtacagtaggttggcctgaagagacacacgagcgagtaattacagaggaaaatctaacaggacctcaaaaccggtaggacatgggagcaggagagaaggaggggtcaaaggtgatggtgcggtttcaagcctggctgaccacaggaaaggtgatatacttagccaaaataaagaacacagtggtaaccagagttcaggacatgtgagtttggagctcaagagagtcggggctcttattagaatcagaatatttgtcatcagttagttggtttagaaacataaaaactctctataaaaaataaaatctaattcgaatacagcacaaaccaccagttcaacccaggaaaagaatcaagaaaaaggatgtatatatgctgcttctaatgcaatagcatataatcagtacaacactagctttcaaggttgaggaaactgaaataaattttcccaagattatcttccctattttccgatttaagaaggcatttacaaggaagtttacagaaactttgttttttttaatccatccctccttaagatgtgcaaacttagtcacatttgggatttgtgaaacatcttgaactgtttttcagacatctgagtccagcaaattcaccattacttttggcaaacatatttcccttaatttgaaaactgacgtgtatgttcaagaaaacagaatctttttgttttggattcataacgtttaactcaccaacatgctttgtcctaatagcagaggctaacgtttgcagagtccttcctatatgtttatgatacggcagcctgtgaagtgtgaagtaggtcttactattgtcttccgaaactgatgaggaaactagaacgctgaaaagttaatctgctcacactcacatggctagtccttcgtgttgccagaactcaaaccaagctttcagatcccagaacctgtgtgtgctacaaatgaacatcctatgatctgaaatccattttatctgaacatcctttccacgtatctgtcatgtgccaggaaatgggatgtggcaaagaaaaagggttggacctctatagaaacaagaaaccgaaaactcacaacctatgttctttatggcgtgaactgcctgcccatttcagagcagaactggcacatatactcttaccattaaaaaaaagtcaaggagacaagagcttatggtgaagaatagcagataaatttcaaacttccaacaaaactcaaagccatctgactcccagctagaagaccaacagacatcacaatcagtggttggtgcaaaagtaattgcggtttttgtcattacttttaaaggcaaaaaccgcaattacttttgcaccaacctaacaacacccatgcaatggacaatttaaaagcaaattgcaaggccaagaagtgaccaaaagttaaagcaaaaaaaaaagcaactccttaggaatttgcagaccataacactttccccttaccaaccttgaagaaaataattttttaagcaaagaaccaaattcttgtttttgaaagaatcaaagtgaacagggaacttcctttgcatcattaatctatcaactttggtttcacattgcatcagcgttaggataataatttctgctttctatcactttaaagtatgttcccaataactatcagatctgataaaagatccccaagaccacagcctacatacgtttatcattagtttcttttttaaagccgagttgcagattaataagaactatcgaattactcctttaaaacgaaatcatgggccaaaaatgaggcaaaacacttcaaattgaaaagtcagtatttgcaaattgttgaaaaaaattttataagagaatgagaacatgtagaacattggaagatttagatgaaaaaaactcttattatttagaaaacacaacatgtagcttatgaagtaatgcatctacatcaaaaagagattattaaggcattttacttacagtcttcacacattaatggacttggacattttaaagtcaacaattatacctaagatctgcatgcatactttctatgggaaagccaatatgtgaaatgccacaaatgatcacttaaaccacaattgcatttaaataattcagaaaactaaatgtcatctccttcgtcatttacacttcaaatataacaataaaatttaaaatcagactatgggcacatgaaactacgggtacactgtacttcctgcataaagattaccaaaggctttatatgttgatataggttcctaaatgttacaaaaatcaaatttgacttgccttttttttttgtcatacaagatctacaacacagtttttcacttgcattattttaaatttcagtgttaagtggcaaatgcttctttaaaaagctgttcaagttttctgaactgtaccttttggttgtgggtctgcgtatgtttaaacaaaactctatacgcatgttattccaggagcagatactcagctgagaaaagtacgaaaacagatctgcaaggacatgcagtggaatgtgagtggtttggctgggaagctcacaatgaagaacaaattgcaccacagaatggctggaaaagttaattaaagcaacctcaccaataactcagccagtaacaaaactttttgttcatttgtgtgattttaatcatgaaatggtggataggagagaaaatgcaggtatcacattcatttggtttttgaaactgaactcttttttttttttttttttgagacagagtctcgttctgtcgcccaggctggagtgcagtggcacgatcttggctcactgtaagctccacctcccgaattcacgccattctcctgcctcagcctcccgagtggctgggactacaggcacccgccacacgcccagctaattttttatatttttagtagagacggggtttcaccgcgttagccaggatggtctcgatctcctgacctggtgatccgcccgcctcggcctgccaaagtgctgggattacaggtgtgagccaccgggcctggccgaaactgaactcatttttaattgttcagttataaatggatatagttcagggctttgttaaagaaagcacaagaacctttctggaaacagtagcaatcaaactacctgttatagcatccatatgattctgttttcctttctacgaatagcgtcagtgcaggggtccaagcatttatgaaatattcatagagaaaaagagaaaagataggaagagggacagagggacagatggatggacagaaggatggagggccatggcgatgtcaaccaccagccagcacacgaatagtgtcccaacttggaaatcctgcaccccacgagctctaaacccagacagggccaggtccaaagcccacacaccagtccctgtgatcaagactgagtgcagaggcagcaggtgaccaggttgcagaagaaagggcctctgcgcttccagcaatccacgcccctcagcataatcctgggactgtaaaaaggctctgaactagttagatgaaaactgtagaggactctgtaaaaaagaccatggtaattattagcatcacatacacaaagaaagggtttattgtcctttcttttacttgttcctctctttagatttatttgttttccaagaatctgcctgtcggcttgcaatccatgtttaaaaacaccacttccatttttcttttatttgatttttgtcccaaaatataaaacagtaaatctcttagaagaaacaggaacactgaaaaactggccagagttcgccagatttctaggacagctatcactcaggcatgtgccctgcaagtttgaccaatcaatgtcggtccccaaacaggacaggattcatacacatttaggagaaaatgtgggctcaagggcacaagctgatcagggcagaaagccaggggagtgtggttgaggaaacaggtgattatttaacactgcagcacaaacatttgtaaatcatgactgctccttctctggctagttttatctcgtggctttctggttgttgtggggctggtcagattagttctgttcccaatcaccctcaacagaatcatgagggaaacccgaggtccaagaccaactcaagacaaatgcagctgcagtggaagacctcctgagaatgtgtccaggtgtggtagtggcacaaacaacagcatcttcataagaatgagactctgtggccatgcagctgagattgacaaacaggacaggcgcttctgcaggctccatgcagtgcagcaacatcttctgccatgcacttgttcttgcctgttctcacattcacacatatgcatgctcacacgcatgcacactcatagttacctctaccacccacacccacacacctacacactcacgcatacatttgcctacactcacacatatcctcacacactcacactcactcacaccctcacacacaggcatgtgcactcacgcaaactataaagataaccaaaagctgatgttcctgaagccaagtacataggaagcatttattccgacagaattaccataaaaattaccaaataaccaacactgcatatactgattctatttctgaaataataaatttgcctaaattttaccaattccagaaaaaagaaaccaaggtaacatatttctaaggagaaatgccttctataaccacattggatgaaaaatgcaaatattctggctcaattaaaataagctccagtcttgactttaaataccatcaataaaggaggaaatattttcacatatatgtaaattcattattttaactcagacgtaaatatatctccctcaggatcaatttaaaactgaagtcatttgccagcaggtttaagagccagctccttccctacccagtacagtcagcaaagcacactcatgaaaccgggtgaagaagtgcaggtgagaagcacaggctctcagcagacatggagggacccagagagaagtggccaggctgcttggaagtatatgcccttagagtctaatgttctggactgcagttaccttccaaaggagattctgactctctaggtggatgtaaaaacttgtaaatcaatcaagtaaaacctgtcttggaatatagaaaatataagaatagcaggttgactcatacaaatcagtgtgcccagataggcagtgtccaggaacgaggaaaacgggccagctcattcttcctaaaggcccatggaaaagcagagaaattcagggaggccaagaatggctatgaaatctacaaaaaggaaaggcattagtggcccacaatggagaaacagcagggacaggaagtgaaggttaccattaacatattcagtctgtttgtaccagggatgctctggaatttattttcaacactccatgcttgaactgaaatgcctctcaacactttgcttaaactttaaaaacacagaatacagaaacagtggctctgtgttatctctgaacacaaataagtaaattaaatttttataagctaacaacaaaacctgcatctcagatactaacattaccttgaggttcagtcattaacaattcttaaaatcctttaaagtagactacttaaagttggggttggaggagactgctgtcctgtcactaattttgacaagacaacttttgtgtcttttgtactaattattccgagtagtgtagatgatccatatgcaacacaaagcattttgaactcttgccagactagtcaagatgatttccaaaatgccaaaacaggaacttctgataataaataacctatcacatttacatctcaaattagaaagtttggaagtcaacgtgtaggttgagtgccaaaatagagattactacattccatgtccccccgccgtccccccgcccctgctccatttgctttctttagcgtctcctagaacaaacactggtccaggtgcaaacgctcaattcacaaggaatgcagagaacacagaaatgactccaggctgggctgctggtaatccctgtgctgctcaccattagaagtggtgctggaggcaacggctttctcgctcacatctgttcgagtggagcacttcactatggaattctcaacttttttcttttcagtggtcgtggagctgtgggactgggcctccatgatgtcttctcattacttcagctctcttcgaccaaaaatgccctaaagaaaacaacagagccatcaactttccaaaatggtggaaaaaaaaaaaaaactttcaaaagtccacttcacctgtcatctgagaaaagcctagagctttaggaaattcaaaatgtggatgacacttctccacaggttttctggcaaaaaaaaaagtctcaaaatttaacaaaccagtgaaactctacacaagcaaaaaagagaaccgagggaaatgcccataacatggtacttttcccaaatccctactgagcgtttggtatcaaacggtataaaaatctcaatttgcaactgtgtctatcatgtgaaacaagtgtcacattactttttaaagccacgtctgcaaatgtctcttcaggtggccaactttacaggaaggggcatttgaacaaattccaaagggagggaaggtttttaattattaattagatgttttaaagagagtccgacaatttctaacatcgaaggcctactccaaattctgaatcagaggataattcaggccaagtagtcagtgatttttgcctctttcataaagatatctgaattgcaatatacctcttaatcctaattcattctggtaagctatactctttaacctctttaaagcatgagaatatttcagttcatttaagttacacttttaagacaaaggtaatagaacaacacgctcttgattccacatggaaaagttgaaaggtgccttagcaaagactgggctcacttaggaaatatcaaaactcagctaaaggcaggttcagtaggtctgtctttcactggcttcattcatgtgataatcgccctaactcatcattcatcaattttcactctggttcatgttcctttttgcagtcatgttctacacctacaaagaatacaagaaaagaggaaaagtaccctctctagcatgttttcttcaagttatctagattgcaacattcatggaaagcatttcttaggtctggccatcttgcttatttttctacatttagtaaatgtcgacatcctcaatcacagcagtggttagtgaaatgaaataagcaactgcttgaccaactaaaagttaaaatacaagataaaatattttcagtctactttaacacatatttgcaagggaactgcaagctcttcattgtataataaattcctccttgatctggaattcaagtaactagaatgcttaagaaccagaggccacatggcacactgtagcaccggctcttccactcacttccatctcttttctgagattatccagtgtcattcattgtaaaacacacaagttatttaagaacagcttttgtagaataaaaaagaaaaaagaagcactaagttaaatttacatatcaattgtaagatccactccaaattcagagacacccctcaaagggcactgacaaagtattatacaacagaaaagggggcttgagatttcccttccgagtgcagccaccgtgcgtgagtcccaagggcagggctacctgcatggcgccccctggggctagctggccagtgcacaaccgccaacaacctgttgctgagcctcagtgatctcatctgtcaaatgacagaatcgggcagtgagatctgacctttactttgggcgggaggaagtaacatcttaagaaggtgttaaaagttaaagagcttctccccagaaaatacccttaaacttaaaagtatacatttaatttccaagggatcacagaccttccaagcttttccaagaatctggacagagaacccttaaaggagaaatctttgatggtcccttctagctctaacaatctcagaataattactttttgtaatggtccttgaaaattgatttaaatatcatctttaaagtatgccacaagaataatccaatacaattggcatcattgtttctcacttggtacaagaaccatttgtatcagtgtttctacagtgcttgctaagcattcagattcctgcaatgcatttgccttggaggatggcacccggaacctcaatgttagcaagcgttactaattgtcagattcactaaagcttgtttttttgtttgtttgtttttgttttttcggttttgtttcttttgagacagagtctcactctgttgcccaggctggagtgcaatggcgtgatctcagctcactgcaacctctgcctcccagcttcaagcgattctcctgcctcagcctcccaagtagctgggattacaggcgcccaccaccatgcccagctaattttttgtatttttactagagatgaggttttgtcatgttggccaggctggtctcgaactcctgacctcaggtgatccacccgcctcggcctcccaaagtgctgggagtacaggcgtgagccttgaacaactgttctacacgtttatttttgctcactgctgtatacccagtgcagtatatactcattgaagtctttgctgacctgatgaactaatgaatgaactgcactctagaatcctgaattctaacaccctacacaaacctatcctagcacccatcacaatgataaactctccttcatctggaaaagtctgtgctgaacatccacctcccctttccaggctgtatgctccatgaggacaaggcttctactttcccagcacttagttcacgtaagaatgtttactgagtacataaatgatcgcatcaatgaccctgtgacttacaggactctgcagcgtcttgaatttcaatcaccactggtttagctacatacattttcttttcatattcagtgtttcgttgaaaactggcaaattctataaaaactaaaaactttagcagaaatatttaattgatccaaacactccattcttagccattgggataagcaagaatttactatgctataattgttcccttcgacacacacataacagttttattggctgtatttgagtagagtctacaacgttaaaactgcacactgaaacatgcaaatgcaccagaaaaaaacccattcagagatgggattcctagtaagaactaagtatcttccttagcagagggtgctaattaataggaatcaggagacaagttcccaaaattccttgacaaacctggtttttgtggagttgttggtttttcccccaaggcaaaggactttattttaacaaagcaataaaaccctcccaatgctcatcaccatagagagaggctcaagtgagaagaggtaaagctccaggcactgactgaaatcacactaattaatggtcttaaagaatactaattcctacccccgtctgaaatggatttttttaaaaataggcccttggtcactcaacaatctacccccttctattttgacaacttatttttggatctcattagttagtacctaattatttaaaagtgtggtttatgcttggaactgggctataaagatggcaatgtgccaaatcagacatctgcttcctgtacactcctataaattatatcagcttattttacaactttgtccctgtcagttataaagaagaaagtttaacattctagacgcccacacctcatcaaactgtgggtgaagagtcagtgagcggcaaaaggtggccgctttgagttgtggtgatggaattttcagggaatagtcaggagcttggaaagtcactcctgagctggtccattcaagcattcgggatagaagtggtcagtagaaattcctcatggaatctcaaaacaccactaggacagtagctccacgacacttttaaaacctggagtttaaaaaataatgaagtataatttatttagaacttaagcatcaagggaaaacgttaagttctgcttcacttcaaagacttttccctgaggaaaacatgccactgtttttcagatgtgaatgaaatgatactttttcccccgacatagtttccttgcttacgactccacactgttctccttcaatccctttcaccactgaaacattacatgcaagatttgctggcatgccccttgacttttcatgcttaaggggaaaaatgtttgtagctgatgtttgagtcccaggagctcggtgaagaaaaaaaaaaaaagcaacgcaaggaaaattgctctaatggtatatccttcctaaagcttgaagtttcataggtaaaaggagggataaacattccttcctgaaagcaaacagtcaaggctttttcccactcaactatccctgaaccttttgtaatttccccgaggcctaaacccagggcacaattaattccagaccctattttaaatctaatccgtctcctatttgcaacctgcctgcaggtgggtcttttctttctaaattataaatctgaacctgcgtcaacctcttacaacacaaggcatttaaagcttcctggagccactgacctggtgacgctgtagtgcacgtctgcatttgaaagtaagcaagagaacagaaagcgagcaagagaaccgcaacctttaccaccttggcgaattcttgccgggacctacatattaaacagcacttgcacacagacgcctcaagtcgtcctctttagagtcgtcacttagacctgcaaggggcgggggaccagtggaaacccaaacagaaactttcaccattacaaaggcgagtccccattgattatggtaattgttttgctcaggttgtacgggtatggccaattttgtttgaaagctcgctctttctctgcgctttcctgtcgagttcccttcaggttctggtttcctccgacggtggcaagggatgtttttcacgcctttcaccacttttgcccgcgcctgcgtcccctgcccgaggtcccaggccgcggcggcggcgcggtgggttcattagcgggcgcgccgggcccgcgcagcgctgtctgcagccgcgtcgccgcatccatcatcattacatcagcgcggggaagtccacgccgagttctcccggccccggcgcgccccagtcagcgcgccagcaaacagaacatgctggattgctcagagacggctctgggtgtctgggggcagaaggggtgctcccaggcccggctttgatccgcatttctgaagctggctttgggagacaatgcatctccgccagccaggccgcgggaaaagtgaaaaaagggctgggggccatgtgggggtggggaggtgagctccagcgccagcagcgcctggcagtctccctccagtgcagagaagcggtctgtatcaaggcgtatcagagtggtcaccctgctcctcggaatattcacgggcatttgcaaactctacagttggcccagccaaatttccagcaaacactggcaagggccggccctggttgcgttcagagggctcttttaactggctgaattcagggagctgcaaccttccaggtactttgcaatgcaaccaccctgagtgtcgcattataataaaacattggggatcccttgaaaagccttcacaaaaccaataggtgtgtgcttcgctcacaaaacgtcgaattcaccttctatgaacctggcccccaatgtgtttttcttcattagctgccatacatagattcaagtgctgtgaatggctaagacagacacatcgcctcattgtcttgagctcagggaggccctgagtggagtcccaatgttcaacctcaacaaccagaggctttctgtagtaaatagaaaatatgaaaagtcacaagtgtgggaacgtgagaaaaaattagcttttctcctttcaagtctctgcagtgaaacctctaacccccatgggagcaggattcctttatcgtttaaacactaaaatgtttaaaaataaagcacccatgccaaagccaacgtttaaaatgatgtttgaagtgaataaaacaactttctaatgtagggtgaagtcgaacagcatccttcaatcatgatagtgcatcctccctgaacagcagactacttcatttatttccctaagccagttggtttaagttgcctaaacttgggcaaaaactctcttctcttttttttcttagtgtatttcaagatttaaaacaactaagttaaaagcctatttaatgataacccgatctgtttctgataggttaaaacagctactggcaataagagatcagaaacagaagacattccaggcgaggcagtgctattaacagcaccatggctcagccttaagtgagaaattattccgtgtagtttagggaactattactccagtggaagaaggttttcctccagagaaataacatttatttacacctgcctgtattttcataagctgaataatcttgatttgctgttttaaatatccagaagaaagcagcttgtcataaggatttttgaggcaacctaccctgtagcactgaagagtgacattgctctcatacttatattactagtagatcaactgctacttcaagatgctactcccggattaaccatccaggtaaaactactattaaagatatgtacctccctgtagctatttaataacccatttctcaaaaataaataaatcctttagaaagagaatttttttttcagaatcaagaagtacaaactaatgttgatttgaactttttgatcaattctggaagtgagaaatagtctgagtttcaatgagcaaaatgcagggaattttaaacatttcattggatttcatgtattcatgcaccacagaaaacctcttataggtttttaatgtggttgatgtttccttgtgttcaaaatatcttctgagggcaaaatcaattagatatgcataacctttgtgacactctagcagttcccaggattcctaaggcttcatttcctctcccttccctgtctgtgttgcctttttctgcaagggttgggcggggggggggggggtggaaagcccaacttcataagttcttaatgaaatcttcattaatttttaaccattttttcatgtataattattttacctgtatatatgattatttttccataatcaggaaagcctagaatcttaactccaaataggaaagcttctatctgtccgctttgccatttggtagctcagggttccccaaatccactgcctagtgtcttcaatctttctttcctacatttctgatgctcctaatcacagataagcagtattcatgacagacatacccaaatggaattactccaaggggaactaaattactctaaggggaaataattgcctggctatggattaagtgaatttggttttggtaaattaacactatctaaacttttaagaaatccatatatttaacttcaaccactgaaaagcttatttgacatgaaagtaatcattgctactgcagttaaaatcacaaacaacatttctgtgagccagttttacttttctgccatttgtatttaaaagaaaagatcatcagctactcttcccctgttgccagaagtacttgatgagaaacatttgaggggagtatgaggtctccatctaatacttgttaccatttctcagttctgtaaaactatgagtcccacgtgccttggttaggcactgcaggaagcagcatgcatagcaggtgccattaaaaaatgagcaataatgtgcagcacactggcacccccactttctacggggttagctggatacaggcaatccttctcagacagagaaggagatctggaagtcagttatcagtctatagatcagctaagctcatgaaaactgtattcctcttaaatccacatatatcacaaaaatatcatgactgatcagatgtgtcccttgtctcgcttccctgaggcttataggaattaaaagttttcacacattttcagaagaaaaaactttaattattcttatagaacttgtgtagctttggtttcttagaatcatgtgtgtctttacagtaaggcttaagggagtataagggagtagagtgtatgttccatgaatagtaatttacttttaaaccatcacaaatattagaccaataacctgttgcatgttaaaatcatctacagctatcccaaaggtatttaacatttttttgtgaagtactacttaccatattttatcctcccaacttttaaacttttgatccttgattcttaattgcagatttaaaagcaatactttcagaatttaagcatttataattaaggattatccagtaaaaattaccccatggtccacttaccctataaactttgcttgttcacagacagaattctttagctgtcttatttttctgccttgcatgtacaaaactgccagtgtaacctacaccaaactacacaccctctcaatgaaactctctgatatggaatttcattgtagtatccacagttcaaacagcagacactgtcctgaagtggcatggcctgctccacacgtctggccactggattccaggtttccatacatcagagtcattaaggcttcaatcttaagctgctggatgaaatttctctacacactgctaactttcttcagactgaatcattctttttaaaaatatcacaaaatgaaatcaataatagggcttaactatctcagtccttcattactgcaatttgaaacttatctttcatctaaatggtgagttttcagtctctctttgtacaaatcaatagtttgtaatgtaaagcactctggagccttcctaggcatttcatgcaatcttcaaaaaaaaaaaaaagttaaagtagcaaaagttaaaaatttccacatgaaaataagcaatataatgtcacactaccttctgaagttactccaataaagatttaagtaaaagtgcacttatcccccattacttaattaatttaattttgtggcataagaattatagaagtacacaatcaaatgcttgtggtcaaaatgtactcctgtgccaccctcccccaccacctagccccctcccctcttaaaaaagaaaagaaaagcccctctagctgtttcaggccagcagtcaatccaatttactgcaggtacaatttatatgtacagtgcatgccacaacaaaaccacagtatgatgccaacacggcccttaagaaagttttcccctaaatctctggaaaggagctttaaaagaaagcaaggattacagtcagctagaaggtagggaggggacttacctcaaacccagtcaagcggaaatcagagcagtaattctacaagtcgacagagtacactttcaaagctataatggtgtgaagaagtgctgggcagcatggcctgaaggcagcactaatacactgatgactaatggctgggcccgggcagacaatgaatttggggcttgaacactaacagaaaccatgcagtactttgacaaatgggctttcacaatttcattcattgaataacctttaagcacaaaactggctagcgttctcttgggaattatatgacatgttgttggacaatgatgtaagtattttcttttttaattatgactcctatgcaaaatgcagaagtgccatatatgagagtacaactatagataccacagatgcagatgtggagctcaacacaatattgcctttcaggagggggctgaaatgttccaaagccaccttattaactatgtaatggctttttcattcagcttctttagaaggccatagattttctgagacattttgtcgggttgaaatatatacacacagaacaaaaaacactttcacatttaaaaaaaccaaaagacactcacagaggtaatgagtagtgaagaaatttggcactcaaatatagcgcatttagaattacaagtggaaaaagtctctcattttcaggggccaggcaaaagaaaagtgccataaaacaattgagacaccatgtaaagtttgcgatcaaatgtacttccaaacacatttaacattcaatttctttcaaacagctctcctccctctccctggagtgactggcctttcaatttaaaaataataattatggcaatttttaaaaaagagaatgaaatatctaaagtggctctaaattaacaagtaccacttactccagacagcattgcctttagcagctcctaaaaacttaagaaaaggatcttaaaacaggaagcttagtgagctcataaaactgttgctggagccaggaacacatagcatatttaatctgcaaactgtgagagtctacagtgatttcagcaagatctgaggcatgccctcaaggtttgctgggatctgggattagggggttgataagaacctccactgcccatggacatgtttttcttctgcagttaaacacaaatgcatagagacgtttgactgctgcttggcgttactgctcaagttatataaaagctttgcagctccttttgctgtcaatatatcaaagtttaaaaaaaatcatcaaagtgtgaaatttcatttaaagtcttcgccagtctacagctctatttcacaggcccatcaaataaaagtaaagatgaaaaatacactgaaaatacttgaaaaagtttgcagcagtaccccctgccctgttgttgtttattctgtctccctttatttgctttgaaaccagaaacagatcaattttcatctagaaaaatgacaacgtgaagagaagggcagtatcttctcctaggctttaatgaaaagacaacctgaagtcattattagagtggaaccttttgtttaacaaacgtgtgtgtatgtgtgtgtgtgtcctataaagtcatttcagcattttaattgcctctcatgatataagttggcagaaaatttactgaatcttccaaaacaaatcagaccgacctcagaatatgaatgccagcaaaactaaaacctccttcaaagaattctttagctggggatttacaacaattgcataaagaagaaaagtctgacttttaagataatctactatagtctaaaagcattaacattccattgctaaggttttcttgaggatttcatgactcattgattcacttttccttcaagactggtttttcttagtacattactgtctccatgtaagtgagtgcatgcaacaatgatcattaaattgtttcttttcataagctcccaaactctatcctcaaaaaatggagggggagaagaggtctcagtaagcaggataccttacataggaggaaggacctctaaatggctaagcacagaggaagtctgaaatgcttacagcatgcaggtaattaaggaaacttcactggccaagaaacaaaggaaagtccaacttttaggcttgcacatcgaattgataaattaacaattctttcattaaataattaatgaaataactctacagagccatttttcatcagtattgaattttctcatttctgtctatggtcctttgcaaattagatatacaatagaaatgtgtttatatcaaggttcagtcaaggaacacaagcatgttaaaggcactgggaattggtaggcatctgagttggacctaccagcctactaacaataatacaatctatatctttaaagtgtttctgcttgtgtgaaatttcactagacacctctcacattggactcattcatgcatcttaaaccaaagcttccctaggctgactttaagaattgcataccctgaaaggatctccccttaggcggggagtttctaattaaatagcttttagtataaaataaactctctactctgtataagcatgctattacaactaatttaaatgttatttcatgtttgttttaggtttgaatatagtttaactggccaaagtgtttgtgtaccaggtcgttaagaccaatatttcctaacataaacaaattcttcagatacttcacagagtttacattgttaaaaccagtcccggcagctttaatatatcccctcaactgaaatactgttctgctttagaaaaattaagagattttgaggctatttcactattttaaaacatagcattttcctccttcaaaagaatcttgacacatgtaattaagaaactgtcagactactattaatttttaatctaaaacctaaatgaaataattacaggaatcaatcaataaggcacctattcaaaattaccgagcaattacataaatactcaaaattaatactttaggtcaattcttgtagatttcggtctataatatgctaagacatcaaacaacacaaaaagtgtagcatggggaggatgaatggttcctgccttaaatagactgaaaagagctcatttcagacggccagggtgcaggccccccacccgccatgcccaatgcgctcaagctgaaactcttttatttttaaaagttaatttatttccaccagacacatatttcagggatctaaaaaaacggcctcatccaaattctgtacaaaaatcacatttaagagggaaaggcctaattactcgaattttcagcaaagtgtatatactgtgctctggaaagcctaactggagagaagagggaggagaggaaaaggggagcaggaggtattttttagaactaataataccagcccggctaatggcactgccatgtatttgcacagcggccggccctccatacctttgactaaagggttctttgacttggagacgcagacagtccatcatttcaaactgaagtggcagctggaaaatgtggaacagctggcaaagagctgggagaaaatgttttacataaatatatgtacatataaactggcagagggccatgagcactgtacccaaggccagaatctacccggcagtctgcactggggagatgagaagttggggcaggatgaccagcggcggagggagcctccttaatcctctttccacgcggggtcaggcagggaagcctggggtgcagcgcctctcgggggacggcatcttacagaaggaggtgcaatgggggacaggagcacaaagttcaggaaaggataaaaggccgggtgcggggtggagcgtccgcttcggacaatctgcttaaaagtcgcttcacaaactctgcaagtttgggatcaatatttacaccctctctgccttctcccgcccgttttcccgctgctactcaagaaagtaactgtcccctgctgctctgtgtaaacgcggcaccttaaatgattattgcatggaccacggttactttgtgtgtctgtgcgcgctgcccctggaaaggaaaagaaataagagaatcccaaatcatatacagatggtacaactttcacttttcctctatgacgacgaaggcgcgcctctctccatccgctcacaccacacccccgccctccgaagcatagcccgggctggagaagccccagcggcggcggcccccgcggcggaggtccccgcgcgcacccaccatgcctcccgcctccttccgcccatcccgagcgccgtgcgcgcccgaagcccgagccgtagagcgccaccgcgcaaaggaaggagccaggcgcgtgcggggctcgcggagttcttctgaaccctttggatgggggcggaggcgaggggcgccgccaccactgcggcaaacttcgtcccccctccgggaggtgaaattctccaatccgtctccggccggtccgcgggtcggactcttcggaaaggaccttccaggaggagggagcgaatgcaagccttgctcggacgcctcaccggcggctctctaaatctgggcgccttttgacagccattttcactccatcccgtccccacgctggggaccacctctggccccggaggcgcgggcgcggccgcaggagcgggctgcggggtccgcgaaacaaagaacttcgagcgggacgtacctgcggcggcagcggctgtcaagtccccgaacttcccatagacccgcggacggggcgcaggctggcggctccccgctccgcgcggccgcgggcggctacggctaccgcgagcggccgggctgggcgcggggtgcgcccgccgcgggcatggtgcggcgcgggcggccgcggggcgcgcggggaaggcgggagagcggcgcgggtgagtgggagcggcgggtgtgcgcgagtgcgagtgtgcgagcgcgccggtggcgctgcccctgcccgctccctcccgctcgtgcagctccggcatcagtttcggggatcgtgtaatccgatcccttctgactcacaagccctgagtgacagttctgatttggttcaaccgcgggagggaggggaaagagaaagaaagaaacccccagccgtacgcctctcctggcatccaatcgactttctggaaaaaggtcccatcccggcctggtgccccgtgctgggtggagaagccccccgccccgacctggcaccgcctgcactactcacggggtggaaaagttgtccctcggctccgcgctcccctcccgcgcgctccctccttcccttctctcctcctcttcctcctcctccccgcgctcctcctcccccaagttttaacagatgttgccggactctcctcgctccctcgcactctctcttcctccgccccggcccccgcccagtcccttttctttcagccactctcgggctcggaggggacgcgctgagcagcaggacgcctgccgccgcagggggcgaagttgggaaaacttggagtgctgctcgccttacttttgctttctcgctccttccaggccgcgccgggagcccccgcttctcccgcccgccgggtccccaagcccggagtgggtcccagctgcgaggcgggcggcggcggctgggaggcggcgcgtcgcgggccggggtcgggggctgggggggagcccgggcgccgcgagccacgcgcgcgctccctccccgccctccgccgccgccgccgccgccgccgccgcctcctcctcctcctcctccttctcctcctcctcctcctcctccgcccctccccggtcttcacacagacacattcatgcctgctcctcctcttccccctacttgaccccgcgccctcccggcgcgccgaagccccacccacccggcgaggggaagggggcccgggcgtgatgtcacccgcgccctctctcttctctctccacaccgccaggacaccccccaaatgcgcgccctggcactcgtgctgcgtcctgtctgctcccatcttctcccacccagcctctctttctcactcttgctcaagggctggactcccctttattcttttaaggcttctctgattaccaccgccccccatccttggctccccatctccttgttttacattttcccaaagccatccccgaaactccctctcgcgggatgatgcctttggaagttcagggtttttctctccaccggactcgtctgccctcggggccaaatccgcgaagcgaggaggagctcccaccacaca

SEQ ID NO: 228 - DNA, 78196 bp, Homo sapiens
  source 1..78196: mol_type = genomic DNA
ccactgtcaaagaggcaaaggtgttgatttttgtatatgaagttaagcctcagtggagtctcatttgttagtttttagtggtaactaagggtaaactcagggttccctgagctatatgcacactcagacctctttgctttaccagtggtgtttgtgagttgctcagtagtaaaaactggcccttacctgacagagccctggctttgacctgctcagccctgtgtgttaatcctctagtagccaattaactactctggggtggcaggttccagagaatgcagtagaccttttgccactcatctgtgttttacttgagacatgtaaatatgatagggaaggaactgaatttctccattcatatttataaccattctagttttatcttccttggctttaagagtgtgccatggaaagtgataagaaatgaacttctaggctaagcaaaaagatgctggagatatttgatactctcatttaaactggtgctttatgtacatgagatgtactaaaataagtaatatagaatttttcttgctaggtaaatccagtaagccaataattttaaagattctttatctgcatcattgctgtttgttactataaattaaatgaacctcatggaaaggttgaggtgtatacctttgtgattttctaatgagttttccatggtgctacaaataatccagactaccaggtctggtagatattaaagctgggtactaagaaatgttatttgcatcctctcagttactcctgaatattctgatttcatacgtacccagggagcatgctgttttgtcaatcaatataaaatatttatgaggtctcccccacccccaggaggttatatgattgctcttctctttataataagagaaacaaattcttattgtgaatcttaacatgctttttagctgtggctatgatggattttattttttcctaggtcaagctgtgtaaaagtcatttatgttatttaaatgatgtactgtactgctgtttacatggacgttttgtgcgggtgctttgaagtgccttgcatcagggattaggagcaattaaattattttttcacgggactgtgtaaagcatgtaactaggtattgctttggtatataactattgtagctttacaagagattgttttatttgaatggggaaaataccctttaaattatgacggacatccactagagatgggtttgaggattttccaagcgtgtaataatgatgtttttcctaacatgacagatgagtagtaaatgttgatatatcctatacatgacagtgtgagactttttcattaaataatattgaaagattttaaaattcatttgaaagtctgatggcttttacaataaaagatattaagaattgttatccttaacttacgggctttttctatagcaagactgagtggtattctttcccctttaaacctgaggtcagtttaccttctattatatttaacatgtagaatagtaacatgataaaaatcataaaaatgatgaatattttatttttcagacgtccatattttaaatgtaatagttttataaaagaaaaggttggcaacctgttaaggagatcttcatgtgaaaaatacatgtagaagttttaaaaatttgtggatataattgtcattcagaattaagcaggttgattgctgttatctagatgggtctcttcctttatgtttttcagtcacataatcttgatttccatagttatcacatgtacttaaagaagttaatcaatgcctatatggtccaaggtataatttgcacacagtagtttttggtttttatattgtggatcatatgtatcaaaggtaatattcataaagaacaatgttatagttggctacaaagggacaattccacatttctatacagggaatattttaagggtagagttatatcagctatggtgattgagtttaaatatccctgcagggtcaggaacaaaccagctttcccataagtcgttgtgaacactagggaagtcccaaggtttatgtcttccattccagtggagtaatttagcttcctgcagaaaatgctccgaatatctggcatctggattccagccttcattgtgtatagagaaaaaataataggcttgttagagaataacatttttgtattataaattgaatacaagttcatagtttaaaaaaaggtaaacaaataaaaaggttatacagtgaattttctacccaccccaggtctccaaatcaaccactgttagtctcttgtgaatccttctagtagtgttatagcattgtttgacctgtatgcatgtatatgtatatttaaagacagaagacaaaatagagcatactgctaccttgcctttaaaaaaaaattattttgtttctttatgtggacattgccttttaaaattactgtcttgggaaactttccacagcagtacatgtggatttaccaaattatttttagtgactgtatagaatgatactatttattgaccaagttccttattaaggacatttagattgtttctatcctattattagcataaacacagcaatgagcagccctctatgtatgtctagtgtatgtgtacaaatatatatatatatatatatatatatatatatatatatatatatatatatatatatgtaggataaaatattgtaggtggaattgctagattgaaggttgtgtgccttttcaattttgatagagattgccgcattgtcccccaagaagttctattaatttccctcccacccaagagtttataggggttcttttttctctgcatttcacctccttaatgaaaaatggcaacatttgcttttgaacagtcttgtctaaatataaaatgtgactaagatctactttttaaacaaacagctatctatctccacctgaacattactcccctcataagtcatgacttcgagagactatgcatttaccctaacagtgccattgcttagaatactctttagaatacctattctagaactacattaaggtggcgtgaatgtacaattttttaaaaatctctatagtgttcgactttctttccatgaaaaggaatttgatatatatattctttaaacagctgaaagtccattgaattacgagagggttgatttgctagggttatgttattctattgtatgacgttaacaacaacacaacctggcttctgttactaataaacatagctgtgacggcagctgcagaagagaaactagttgtttgaaactatcgcagcataactggaataattatcaatcatcagagtctatgcaaaggaaatattcatttgggaagaggcaccttcccatgaaaagtctctactaagtaggacatcctcacctctcagcttcgtaactgaagggctatgcagaactacctcagaggggcttgcagtttgggtgatgaaattgcttttagctaaatatattttgtaaatttaaaaaatcttaagcctgcctgtttagacccaaacttaatgcccattagtgttatgttgcccttctgcctccagaacatcctgaaacctcatttttcaaatgatttttgtgtagatttactttgcacaccatccctgattccaaaaccttcagcacagatggaagctctgtcctacaaagaaaaacgacatctttcctttgggaagagtatgtcccttcctacttgtcagtaaagtggatatttctcttttttttcttttgagatggagtctagctctgtcacccagactggagtgcagtggcatgatttctgctcagttcaatctctgcctcccaggtttaggctattctcctgcatcagcctcccgaataactgggattacaggtgtgtgccaccatgcccagctaatttttcatatttttagtagagatggggtttcaccatgttggccaggctggtcttgaactcctgacctcaagtgatccacccgcttcaacctcccaaagtactgggattataggcatgagccatcatgcctggcctaagttgcatgtttcataaaatgtaattctgagtctgtctcaagatcataaaatgccgtaaccttattgatctaagctctgcataactgttcctacacatatttaaaaatagaccttctactttgatgggatctgcacatggaaaggttgatatttgacctaatgttgaacccaacatgactataaatcaaatcagacacaacactaacttccctgtggcactcttttgtgcatatacatgctcaggaaaatcagaggattctgggaatgatgcagaagcaacccacagaatcatcgagagcatacaggaactcagcctccacaattacgtcctttaaaaaaaaaaaaaaaaaaaaaagattatgggacataacaccttgcagggttgttgtgagaattagaaataatattcaccttccttaacagaacctagtccagttcttggcaatgtaatggacacttggtaaatataagtgcatatccattgcctacaattctaagataatccccaaaggtctgaaaacaaaaggttttttaataacttctttggcagtaaaacctagatcccactcagcaccacattacctttttaaaatccaaaccctttctaaacttccaaacatgtctggcccagcggttttggatcagggattgtggccatgtgttagagtggatgtgaatgtgtcctctatgctaggctctatgctaagcaatttacatgtattccgtaacctgccccaaatcatagttgggattccagttcatactctaaaccctacacttgtgtagtgagtaaaagacttagagaactcacagagtacagagtcaactgctttttaaaggataaattttaatggcagctttctgaattcatcctaagccattatgctaatttatttggttttgtccactgtaagttactgcaagagaaaataaaagtgtggcttgacagttcaataaggttttgaagttttgacagtgaaagttctctctctctctctctcttttttttttttttttttgagatagagtttcggtcctgtcgcccaggctggagtgcagtggcgcaatcgtagctcactgcaacctctgccttccaggtccaagcgattctcctgcctcagcctcccgagtagctgggattgcaggtgcctgcccccatgcccagcgaatttttatatttttagcagagacgggtttcaccacgttggtcaggttggtcttgaactcctaacctcaggttatccaccctcctcagcctcccaaagtgctgggattacaagcgtgagccaccacgcccggccgaaagttctctttataatagttcatgtttactaagcacatactatatgctaagcatgaatttgatggctttccataaatctccagaaacacgctcctcaggtagctcagaatatcagctgcacttgctgaatctgagcactgagggtcaagtcatttgtccaaggtcacctggaggatttcaattgaacaacctggtgctgtatgtagcaccctctcctcgctatggtgctcactgggtctataaaatgcacatttgcggccgggcatggtggcttatgccgtaatcctagcactttgggaggccgaaatgggtggatcacctaaggtcaggagtttgagaccagcctggccaacatggtgaaaccccatctgtactaaaaatacagaaattagctgggcgtgatggcacatgcctgtaatcccagctactcgagatgctgaggcaggtgaattgcttgaacccaggaagcggaggttccagtgagccgagatcacgccattgcactccagcctgggcagcagagcgagactctgtctcaaaaatacaaaaataaaatggacatttgcgtttttctaaacagtttttctgaaatacttacccaggtgccttatgtgccacagggggttaattgtggaatatttcccatgaaacacaatcagcattggggaggtggccacccctcctcccagggagctgctatagaggttttccctaagaaatgaaatagaaaaacaacatttggcctggagcccccacaaactcagataaagtcgaatctgatattgtaaatgatgtaagacattatctcactatgtactaagacttatggcctttcattctcccccaaattttcattttgaaaattgtcaaacatacacaaaatagtaagaataccatgaactcctatatacatcacctagagtaacagtgttaatattttgccattttaactcccagggttttaaatagtagacacaggagatcaaattcgaatcctacattatttagaataactttacttgcaaattcaaggttatgatggtattaaaatatccagatacacaagactgctaggcaatacaatgatgggataatagtgcttgtattagacttatttttatcttctctattttaaaactccgataacgaaaaattataaattataaaaataaaccttaaaaagcaaaattgactttatataataatccttaataaaaaaatctatgttaggaggggaaactcaactaagataaatgaagattgtttggtggaaaagattcaagtcacatttttcaacagcttactaggaaaatgtataatcagggactcctcgctccacaggatcttgattcctctgatttatatcttttgaggaaaggttttaattgactgcccccttttctttcttaacattgcctctgtaagaaaatctgacctgagatgactgtgaaatatttctaacccttgaactatgtgtggaaaattaattgaatgattttgtttccaagcatggaaaaaatggtagagaagccttcacgtactccacattcttttgcatccatttctccaattgcttggtgatgcgctggtgcttccattctgtcatgttggcaacaatcacaccaggattgaaagagcaggtgctggggctgatgccaaggtccttgatggccttcttccggtagtccagatagcccatatatgtgttctgtaagggaacaggatgtgcatgcttttgaccagcgaatcttttgtttctggaaaatgatcattttcttgaaacccttgtgcagtatctttgggtttcctcctgtgtcactggccactgggtagtttgttgtttttgttttgttttgctggtttccctcatttctccaacctctaaatgctgaatgccctaagtctgagtgcagcactagtgcctttctctagcaataactccataaacagccttgtccagtctcatggctctaaataccacccatctgacagccctgacctctcctctggacttccaactcctgctacatctgccatccaaatgtctcctttcagatgcttagtaaaggcagctccaacttacatcccaaaattgatcccaatcctatcccaaacctgcttccctgcacctgccccacctcagtcagtggcaactctatccttctagttacttgggcaaaaaacctggggtcattaggtcctccttgactccttttttctcactctcttctcatccaaatatttcagcaaatggtgtaggtcccatcttcaaaatgctggaagccaaccacttctcttgccactactaccacactgctaccttcctgttcaggccataattgccactcaatggatttctgcaagttcctcctaaccagtatccttgcttccactattttccaccccactctgtctctaggtcactcatctcctctaagctcctccaatagcttcccatctcattcacagaaacagccagatttcctaaaatggcctgccataccctatatcatctgaccctccaatacctttccaactcctgttattctcctcttgatccctcagcaacagcgaccacctttaatgaaccagactcacccctgcctcaagatctttacacttgttcttcccgcttcctggagggtttcccctctaaccatctgcacaggtggttccctcaattctttcaagtttaggttcaaacagcacaatctcagtggagccttccctgattactgtatttaaaatacagccctgcctccaccccaatcctctgttaaatattttacttgtttactgtctgtctgttcccactagaatgtgaaatacacaaaagcaggagttttcgttttgctcactatattactagtacctaaaacagtgtcaggcacagagtaagcactcaataagtcattgttgaatgaatgttgtacagggcaggacatacacattctttcacccatatagactgttatcatctataattccttaatgtgatgctctcaaacctcacacaggagtcatggaaatacttgagtactttctatacaccaggcccttttctaagaactttacatgtactacctcattactctcatgtaatagctttatatgtgttaactaatttaattctcacgataactacaaaggaagtactattattacctctgtttggcaaatgaggtagaaacaactggctaagtaacttgcccgaggtcataaaactaccaagtgatagtgcccagattttgacaaaattgaatctggtcccagagcctatgccttgaagtgccttaaaatgccacatacataaaattatttgctagaagcttttttgaaaaacagcatttaactcttaataacacctcatatttcaaagctaccccttcggtttcagcattgcatgtaggttcaactttcctcagttccatcagggtaaggagatctttacccttaacaaaatcaatattttcttctactggaagggggataaaagtgatggtcaaaactctgaaaatagaaccaatggttcagcaagtctcttttacagaaaacatcatctctgacagagagcatggtgatgagcaacctaggtaacaatgatcatttctggagcttttatttcatgctggacacttggacaccatgttatttcattactgctcacaaagacacaacaaagtagacatgattgttcccatgtttcaggtaaggaaggtgggaccttgcagggctaaagaaagttgccccagagttggtaaggcatggagctaagatatgaaccaaagtcccagacccctgtactgttccacctccctgcagtccagactggcccataaggtttttgaggtggaggttacactcattttgacttgcagaggggggagaaggggccagagttgtagagtgaagggaggatttctgagacagcatatgcccacctgaagtcccacgagtctgtttatgtcctgagcagagggcaaatcgcagtcatctgagaaagccgccgcgtggcccagggccaaggtggtgtcatacagttcttggatatcacctgaatttagaaacaccaccaagtaaaacattatagcatttgtttttgggctagatagagccttagagcttaaacagctcttgattttgctatgggagaagagtattggatccctgatttcaagtggcttgactatttatttattaagagtcttgcctacagatttagaaagccactggatgatgagttcaaactggcactgatctaatttctttatttctgttgctaagtagataccacaccaatgcgtatcctgtttgtagtggaagagatagaacacaacatttaaacaccaaaacttagctcactcctaagaatgtcatccgtgacactttatttccgtacattataggcatacagggaaaggaaaggctaccaagctatttattgctggttttgacaatcagagtgtcaactggattgtctcagtaagtatcaacccgtttccaaaatacttccacatttacaacaatactgtactcacaacttaaataagcagtcaaaacttgctgcacaattagttatttgaaaaatgaagagagacagttattctacttatcagctgcttcttttccaagtgttcttggcagttagcgagagtaccttgtacaattacatcatcgtccaaatagatgactttctcgtgttggtggataagtagagggagataaaatcgaacaaagttcagctgttaaaacgacaaaagaaatgatggtgggggagaggcatatggcttagtgtcttctgggggtactggagagtcggctttgaccatggcctcagctcagctccaggtttggagcggaataaaacaggagctagcaagatgtctcatctgagcttcccagtgcccaacttatctgaggcctggggctgaagccagcgctgacggatcggccgttctcctagatacaaaccccctagtgccgaggctgttgccactttcatctctgcgaactgctgtagtgggagtcacagaggctcgttagtcacttttagggcacaaatcgcctgcctttctctgtattcagtaattttgataattgtcaattaaatcagccttaaatacacacacacacacacacacacacacacacacacacacacacgtgtgtcattccaacagcaagctcaaccttttagctccttgaaccagaaaaaggagcagcatgacctgtgggtaggaacttcgaagtttcattactgacaacattgcttcctccgaagtcatggcttgtactctgacaacatctggaattgggggaagatcatatcacagacagagggctcagaattaagtaaattttcagggatgaatttaagtaacaatcatatgtagaaggtggctgcagtttctgtagaactgctatcaaaaacaccactcttttttttttttttcttttttgagacagggtctctctctgttgcccaggctggagtgcagtggcatgatcacagctcactacagcctcgaactcccagactcaaacaatcctcccacctcagcctcctgagtaggtagctaggactacaggggtatgccaccatgcctagctaattaaaaaaaaatttttttttttgagacggagtctcactctgttgcctaggctggagtgcaatagtgcaatcttggctcactgcaacctccacctcccgggttcaagcgattatcctgcctcagactcccgagtagccggggctacaggtgcctgccaccatgcccagctaatttttgtatttttagtagagatggggtttcactatgttggccaggctggtctcgaactcctgacctcacgatccgcctgcctcggcctcccaaagtgttgggattacaggcatgagcaaccacgcttggccactaaataaaacttttttaagtataaacagggtctcaatatgttgcccaagctggtctcaaacttctgagctcaagcaatcctccccgctcagcctcccaaagtgctgggattacaagcacgagccagcacgtccagccaaaaacaccactttttatgcaggagagggtcccttttgtaagaactcttgcagtaaaataccttaagatttccaatgctaggaaaagagatggtgtctcctgaatatattatcttagtcaatactatgaagtatataatccatcatactactgttttttcttagctgtcggacactccgaggcagctttaacgtacaatcacagttaaatatcccaacagctggtgggtttgggactctttttcctggcctcagctacctggccctcctccagctcccacccccacagacatattcacacccataaatgcattctacatttttttaatgcttcacttcttctttaataacttcattgtgcttctataaaccatcttaaatcctttctgtagcagctggcttataaattatacataagcggagtttggtggagatcaactccacatggcttcaaaaataatattccacatgcatcccggtgactagcactcctttactgaacaaaggtctcaccaaggactgtccccagcacctgtgtggtccctacttacaggctggagcaattcaggcctcgatgagtctggtctgatcttccctttgaggaccatcgggttgaattccacgattttaaagtttatttctctcagtttggaatgttcaatccattttctaaaaagatgaccaaaaaaacctctagtatacccttcaattctttcctccatttgcctattgccccaaggtcaatctgttgcctccctagaaagttaaaattaaaatgtgcgtaaatttagtagagtttagtccaataaatccctctgacttttctccccatctggtctgactttaaatctttttttcccctcaatcacgtaactctttctgcaaaggaaatgaagcaaaatagtaataaccaaatctctccccagatccaaataatttccccaggaaacaggaagaatgaaaagtattctttcttatatagcagcatctgtggttgctggtactatcttcgccacgtggtaacagctctgaaatattatgaaacaggacattctgaaccttcagctttgatcgaagtcatttttactctgctgttttgactccaaggctgatttgaatttacctttgtctctttgatttggtcccttgatcttccccatctgtcttcgttccccttcttctcttccccctccctctccccttctgttttcttggtcttgcagaatttttatcttgtatccaattcataatgaggttcttggtagaaataatctcaaaataaaatgtcgaatgactaaagccacctagggtagtatttgttgttgactaaaaatcaacaaaagaattaaatgtgaacaaaatttagatctgcaaaatctgaaaaaataattggtcatatcaattaaaaaaagatagactaacagcaaaataggcaagagacttgaacacttacttccaaatggttacaaagtgtgtgggaaaagtgttcaatgacattagaaataatgaaacttcaaatttctagataccactggacactaatcaaaatggcaaacttaaaaagattgattttatactaagtgttagtgagaacatgctggatgttacatgagtgtgtttactttgtgatgatccagtaaactgcacactggatttatacaattttctgttttgggattctacttcaatgaaaaaaaaaactttaaagtatgtaaaagggggcagggagtagactggacagcaagaactgggaaatagcccctggccaaagtcagaaagtcatgaggttcatgccttttgttaaggacaaacccttgcccagaaaccttatacatgccatccttttggatttggttatctagttttcatacccatggatagttaatgggctgttaacaacaggctaagtgaatgatgagcaatagtatgataaggagagtgagaaatgagacagaaaatccagaaagcatacacaagacatcaaaacccagggcagccaagggccatttagattataggcaaacacctttacagatctcagtacctcctgatggcaccactacaaaaacatttaattataaaagcagtatgcaaatatattctccttttgaatgatcaaataatactgaaacaccctgaacttcctttcatcagcaccctccctgattcctctgtcctcccaagagatagtgttaacaatctgatagctttccagttctttttcttcacagaaacacatacatgtacatgtacacacttacagttaggggttttgaatttcctaaagtagatcatactatacgagttatactgcagctagttttttccacttaacaatatgccttgggaatctcctatgtctgcttagacagagtgccttctttcgttaacatctggatcatatttcacagttcatttaaatattcttccattggtggacatttcagcactttgaaatgttttcactaattcacataatgctgaaactagcattgttgtacacgtattttggtaatatgtactagaatttttgtagcacagattcctggaagaggaaaaggcatgtgaatcaaattatatatgcatacaaccttttgatagatattgccatgttgaccttgccaaatgtcttaccaacttagaaaatgcacattgtataaataaggaataagcatgcccattttcctgcactgggtaatgttgttctgtttaatttttgccaacctgatgagtgaagattgtcactgaagtgacatatatgttttcatttttattttcattttcaacaatgcaaaaatgtttcaattcacattttcctattaataacacagaaaaactttatttatttattttttatttattattttttatttttggagatgcagtctcactctgtcacccaggctgaagcgcagtggcacgatctcagctcactgcaacctccacctcctgggtttaagccattctctggcctcagcctccccagtagctaggattacaggaatgtgctaacatgctcagcaaatttttgtatctttagtagagacggggtttcgccatattgaccaggctggtctcaaattcttgacttcaggtaggattacaggagttagccactgcgcccagccttatttatttatttttagctgaaacaaggtctcactctgttgcccaggctggagttaagtgatgcgatcatagcttacagcagcctcaaactcctgggctcaagggatcctcccacctcagcctcccgctatgtatcaccaccctcagctaatttctaaaatttttagtagagacagaggtcttgttatgttgcccaggctggtctcgagcctgatcccaagtcatcctttttccttggcttcccaaagtgttggaaatataggagtgagccacctcacccagcctacaacaccttttcatgtttattggccatttgtatttttttcctctgtgaattatctggttatatcctatgcccattttttaaccatgtttttaaaatttttgtaacaattctatattttggatggtaattttttgtctataatacatgttaaaaatacttggtcctaatctattgtatgaatagcttcacttgtatttttcatcattgtaaagtttttaaatgtgatgcagtcaaatctgtccatttttctggatgatttctgggctcagagagacactctccaaaccaagattttacaattatctttcatttttataatatgttcaaattttaattttctgtttattttttcttaatccaaaaagaaaggaaatctatttaaggaaatataagaaagtagaggccaggtgtggtggctcacacctgtaatcccagcattttgggaggctgaggagggaggattgcttgaacccaggatttcaagacaaacctaagcaacaaagagagactcgctctccacaaaaaaattagaaaatgagctgggtgtggtagcatgcacttgtagtctcagctacttgggaggtggaaacagaaggattgcttgagccagggaggtcaaggctgcagtgagctgtgattgcgccaccgcacaatccagtctgagcaacagagcaagatcctatcagaaagaaagagagaaagagagaaagacagagagagagagagagacagaaagagagagggagagaaagagagaaagggagagaaggcaagaaagaaagaaaagaagaagaagaggtagggagggagggagggagggaaggagagaggggaaggaaacagaaagtgccaaagtctgtaagacataacttaccgtattcgagtcagagtattccggagtcccactacatagaacaagatgttggcgtcagtgttgctgtagatgctattgatggcagccatagtggcacccatcctccctgctgcagcacaaatcaccacaggaatctcttcttccagttcttcaggagtctcggattcatcatctggaaacataaaaactggtgtcttggaacatgaaagaatttcacagtagagccagtttaatgcatcttccatactcctgggggaagatggcatagtgtggaagagactgctgattgttctccaatatctagtcattctgtcttcccttagaaaagaactttggaattttagctggtacatagccaaccacaaagactattttaccaactcccgtgcagctctatatgatcaagttctgaccaatgggatgttggtttaagtaatgtgtgccactgctgggtctacccttcaaaggaatgctcactcacccccttgcctttcccctttcccattagctggactgttgatatgatggtgggagttagagttgccagcttagaccacaagatggaagctacttgttgaggtcaccaaaaccataatatagaaggaatcttgatctggataattgtggaactgatacatcagacttatacttgagagaggaaataaacttctattttgtttatgtcgctattgaaaccatacccccaaagagttaaagaaaccaatgactaatagaaattctcgagtttgcaggatgatagattagaagaataaaatgctgaaatgatgaaactctttctgcttctgagattatatccctgatgaacactgatgcaaaaatcctcaaaaaaatactggcaaactgaatccagcagcacatcaaaaagcttattcaccataatcaagtgcgcttcatccctgggatgcaaggctggttcaacatacacaaatcaataaatgtaatccagcatataaatagaaccaaagacaaaaaccccatgattatatcaatagaagcagaaaaggcctttgacaaaattcgacagcccttcatgctaaaaattctcaataaattaggcattgatgggacgtatctcaaaataataagacctatttatgacaaacccacagccaatatcatactgaatgggcaaaagctgaaagcattccctttgaaaactggcacaagacagggatgccctctctcaccactcctattcaacacagtgttggaagttctggccagggcaatcaggcaggagaaagaaataaagggtattcatttaggaaaagaggaagtcaaactgtccctgtttgcagatgacatgattgtatatttagaaaacccgaccgtctcagcccataatctcctcaagctgataagcaacttcagcaaagtctcaggatataaaatcaatgtgcaaaaatcacaagcattcttatacaccaataacagacaaacagagagccaaatcatgagtgaactcccattcacaattgcttcaaagagaataaaatacctaggaatccaacttacgagagatgtgaaggatctcttcaaggagaactacaaaccactgcctcatcgaaataaaagaggacacaaacaaatggaagaacattccatgctcatggataggaagaatcaatatcgtgaaaatggccacactgcccaaggtaatttatagattcaatgccatccccatcaagctaccaatgactttcttcacagaattggaaaaaaatactttaaagttcatatggaaccaaaaaagagcccgcatcgccaagtcaatcctaagccaaaagaacaaagctggaggcatcacgctacctgacttcaaactatactacaaggctacagtaatcaaaatagcatggtactggtaccaaaacagagatatagaccaatggaacagaacagaggccccagaaataacaccacacatctacaaccatctgatctttgacaaacctgacaaaaacaagaaacagggaaaggactccctatttaataaatggtgatgggaaaactggctagccatatgtagaaagctaaaactggaccccttccttacaccttatacaaaaattaattcaagatgtattaaagactgaaatgttagacctaaaaccataaaaaccctagaagaaaacctaggcaataccattcaggacataggcatgggcaaggacttcatgtctaatacactaaaagcaatggcaacaaaagccaaaattgacaaatgggatctaattaaactaaagagcttctgcacggcaaaagaaactaccatcagagtgaacaggcaacctacagaatgggagaaaatttttgcaatctactcatctgacaaagggctaatagccagaatcgacaaagaactcaaacaaatttacaagaaaaaaacaaacaaccccatcaacaagtgggagaaggatatgaacagacacttctcaaaagaagacatttatgcaaccaacagacacatgaaaaaatgctcaccatcactggccatcagagaaatgcaaatcaaaaccacaatgagataccatctcacaccagttagaatggtgatcattaaaaggtcaggaaacaacaggtcctggagaggatgtggagaaataggaacacttttacactgttggtggaactgtaaactggttcaaccattgtggaagacagtgtggtgattcctcaaggatctagaactagaaataccatttgacccagccatcccattactgggtatatacccagaggattataaatcatgctgctttaaagacacatgcacacgtatgtttactgcagcactaatcacaatagcaaagacttggaaccaacccaaatgtccatcaatgatagactggattaagaaaatgtggcacatatacaccatggaacactatgcagccataaaaaaggatgagttcatgtcctttgtagggacatggatgaagctggaaaccatcattctcagcaaactatcgcagggataaaaaaccaaacactgcatgttctcattcataggtgggaattgaacaatgagaacacttggacacaggaaggggaacatcacataccaggtgtggggtggggggagggggaagggatagcattaggagatatacctgatgtaaatgacgagttaatgtgtacagcacaccaacatggcacgtgtatacatatgtaacaaacctgcacattgtgcacatgtaccctaaaacttaaagtataataaatagataaataaataaataaaagaaactggctgaaatcagttggaaccaatctggtcaactgaagtttgtgcagaacaagcttgctgatgtcacagcttggatttccaccctgtatttcaaactaactcctcccagatttgcacatgagacccatgaggtggcatgaagagataactgtgcatgcctcaggaccttttagacctcctctcctcttccatcaatcacctactaatcccagaatccacccctgagccttttctaataaaattactgccttaaagccagcacagggagacagatttgagctgggctcctgtgtccttgttagacgatttacaagaaaaagctttgcttttctcaaaatctggggtcatagtgttggattctagcacataaggctgtgagcccttttgatcataacacaaaatctattattttggagctatcttacaggagccagttggctagcctaaaacacacacacacttaaaaaacatacaaagaactgaaaagcctcatttgtccaacagtcctcaactcttccctgaatcagaatatttactttgcctacactgctataagatactggttgtgattttccctctcctatccccattctagtcaagtttctcaaacgttgacagcaagaggaaggaggtaaatgaaagaacatgactaatgcacaagataaataattaattattcttttgagcctggctatgctataaaataccaaagccataacatcatactttagtaccgcaatacaactttcagccatggagaagaataatgatccataagcagagtattcagtatccactataaagtactcatctgatttatacttaaagctctctctctctctctctctctctctctctctccccccgctctctccacctgctctctccccctcccccttctctttccagatcctttttggaaaacctctatccctgaggtccagggtagttctagctgatatttcattcaataagcatttcttgaaattaactaccaggtactgcattttgtgtaatttaagacacattgaatggcctcctctttctccttctatgtcttttctaccagcttgctactgcatctgaaatttccaccactagaataattttgttttcacaatatatttactgacatgagagaatgctcataaaacactgttaaggaggaaaagaatacaaaattctctctagtatttgatcactatttgatacatacatatttgcaaatggacctatgtctatttatggaattaggagtgattttgattttatttgtatttcttatactttccaaattgactaaagtaaccatgatatggtatggctctgtgtcctcaccaaaatctcatcatgaattatactcccataattcccacatgttgtgggagggacccagtgggagataatctgaatcatgggggtggttttccccatactgttctcatggtagtgaataagtctcatgagatctggtagttttatcaggggtttctgcttttgcatctctcactttctcttgctgctgccatgtaagaagtgcctttcgcctcctgccatgattctgaggcttctccagccatgtggaactgtaagtccgattaaaactctttttcttcccagtctcaggtatgtctttatcagcagcatgaaaacggactaatacagtaaattggtaccagtagagtgggacgttgttgaaaagataccaacaaatatggaagcaactttggaactgggtgacaaacagaggttggaagagtttggaggggtcagaagaagacaggaaaatgtaggaaaggttggaacttcctagagacttgttgaatggctttgaccaaaagccagttagagacatggacaataaggttcagggtgaggtggcctcagatgtagatgaggaacttgttgggaactggaacaaaggtgacttttgttatgttttagcaaaaagaccaggggcattttgccctgccctagggatttgtggaactttgaacttgagagagataatttaggatatctggcagaagaaatttctaagcagcaaagcattcaagaggtggcttgggtgctgttaaaggcattcagttttataagggaagcagagcataagagttcagaaaatttgcagcctgacaatgtgatagaaaaaaaaaataacattttctaaggaaaaattcaagctggctgcagaaatttgcataagtaacaaggagccaaacattaatccccaagacaatggggaaaatgtctccagggcatatcagagggcttcacagctgcccctgccatcacaggcccggaggcctaggagaaaatggttttgtggtctgggcccagggtcctgtgctgcatgcagcctagggacgtggtgccctgtgtcccagccactccagccatggctgaaaggggccaacatagggcttgcgccatggcttcagagggtgcaagccccaagccttggcagcttccacgtggtgttgagcctgtgagtgcacagaagtaaaaaattggggtttgggaacctccacctacatttcagaagatgtatggaaatgtctggatgcccaggcagaagtttgctgcaggggcgggggcctcatggaggacctctgctagggcagtgcagaagggaaatgtggggtcagagcccccacgcagagtccctactggggcactgcctagtggagctgtgagaagagggccaccatcctccagaccccagaatggtagatccactgacagcttgcaccgttgctggaaaagctacagacactcaatgccagcccatgaaagcagctgggagggaggctgtatcctgcaaagccacagggtagagctgcccaagaccatgggaacccacgtcttgcatcagcatgacctggatgcgagacctggagtcaaaggagatcattttggagctttaaaatttgactgccccgctggattttggacaagcacaggggtaacccctttgttttggccaatttctcccatttggaatggctgtatttaccaaatacctgtacccccactgtatctaggaagaggaagtaactagcttgcttttgattttacaggctcataggcagaaggaacttgccttgtttcagatgggactttggattgtggagttttgagttaatgctgaaatgagtcaagactttgggggactgttgagaaggcatgattggttttgaaatgtgaggacatgagatttggagggaccaggggcagaatgatatggtttggctctgtgtccccacccaaatctcatcttgaattgtactcccatatttcccacatgttgtgggagggacccagtgggagatgatgtgaatcatggggatggtttctcccatactgttctcatggtagtgaataagtctcatgagatctgatggttttatcaaggattttcacttttgtatctctcattttcttttgctgctgccatgtaagaagtgcctttcacctcccacatgattctgaggcctccccagccatgtggaactgtaagtccaattaaacctctttttttcctcagtcttaggtatgtctttatcagcagcatgaaaacggactaatacaaaccatgaattatttttataaacaaaccaaaaaaaaagtttcttaaggattattccttttggactaagttgtaatcttatggaggtatcatgtgatatgttacctgctggctgtgaactgatctgccaaaaaatgagaatttgacgtttctttgctgctgaaagttcctcattggttcctaaaaggtaaagccacatttctttgcctggcacacaagacccctcatgatccagcccctgctcacttctccagcctcacctccttctattttagcaacaccaaagccctcgtggttccctgaacactactcttatctcagtgcctttgcacatgatgttccttcccaatgcctggaatgatttcaatatccttttctgcatggctaacccttacatattcattccaaatgcagtactgacatcagatcctctgggaagcctttaatacctccctacacataaattaacacgcaccttctctatgctgtggccttgcctatggttgaatttattaattgcgttggaatttatttggttgcatgtctttcctctttctcctattacactaggagctctgtgagggcaggtattttgttcatctctgtatcctctgcagctgtcccagtgcctggcacatagtagattttcaatacgatctgaatagatgggtgaatattagatatctctatttgagcacttgccacaatgcctggaagaatctatttatgtgtctgtctcctccactagactgtaagctcattatattatccccactgagtctggcactttggaagtgcttaatgaaagtttgctggaatgaactaaatggaattgatgaatgagtctcagaaaacagggcccttgaggaataagagggaagggtaaaaaagctggggctgtgcctggctgccagagtcagacggaggccttcagcagactgtgggaagcacaaggtaaaaggaaagtgtcctcataaaagaggggacactccagaaaaaggtcaaacattgagtgtccagctctgctgccaacacatgacactgccacactccttaggggcctctgccaggtagagaaactgagcactaacttaagccaaaaatactgctctctgccaaaaagttccccctggacagaatgaaggacaaatgcacactggagaaatgtggcagaaaggcttatcaactgtaccttcttcatcaatgctccatccttgcagtttctttaggaattatctgctccattatttggattcattgtaccaactggtgcctgagccaaagcattaaaatgttggctatgggaaactatttggtgcctaacaaaaatagtaaacatcacaatgctggcagaatggaacagaaatgatactgccttcgtccattccataagcagctctgatcaagccacgcctattcctagaagaaaggaaatgtctgctttcctaatgccatgactcagaattccatttcaaataaggattgttttagccaagtgtatcagcttacctctccccaagtgggacagctgcgagtgaccagcacactagtcacaagagaagtatcgggagattacatggagtgtcacaatggggatattacagagaataccgccatgttttacttgaacgtaggacttcacagggcctctggacatcaacttagaacactagttctttgaattaatgtttttcaaattataaaaaataatacataattattgaaaaaatttcagcccaaacagaagagtatttggtaaattgtgactgttttctgcagacctctcactcccactccaaaagtagacctctgctttataacaatatataacacaaccagtgtggtgtgtgccccttaaacccttcttaatggtaatactaaagaatatatacctgggccgggcgcagtggctcacatctgtaatcccagcactttgggacactaaggtgggcagatcatctgaggtcaggcgtttgagaccagcttgaccaacatggagaaaccccatctctcctaaaaatacaaaattagccaggcatggtggcgcatgcctgtaatcccagccactcgggaggctgaggcaggagaatcacttgaacccagaggcagaggtagtggtgagccgagatggcaccattgcactccagcctgggcaacaagagcgaaactctgtctcaaaaaaaaaaaaaaaaaaaatatatatatatatatatatataccttaaacacttattatttaaaaaccaaaatggaatcatacttttcagtctcttctgcaacttgcttttcccatttaacataccacaagcattcttccatgccaatgctacattcgtttgaatggtattttataacatcgattttaaaaaattttaacactgaatggataaacatgtgataatggatccattcatgcggtccaaatgctttgtttctctgtataggtctgattaggcagtcaggatgtgcatttctttggagctgttttaacagctgttttaaaacctatccacttattttcctgaagaagggagtctgtggtgggattagctgagtgaatgtgttggtttatgagcagggattgaagcatgaagagtggagtcagttcagatgacatttgtctttatgtgacttccttctctctctctctcttttagaacagtttattgaggtgtagatactgctatggactgaattgtgtcctccagagtccgtttgttaacgtcttagcttccagcatctcaggatgtccatgcacttaattgcctttaaaaaggcaaataagttaaaatgaagccatttggtaggccttatcccagtaagactggtatcctaataaaaggaggaaaagaggagaatcacacagagggtcacagccaggaatgcagcacagagaaaaggccacgtgaggacacagcaagaaggcggccatctgcatgccaaggagagaggcctcaggagaaacaaaacctgctcacaccttgatcctggacttccagcctccagaaccagagaaaatacatttctatggtctagccacctagtctgtgctattttgttatggcagcccaagcaaacgaatacagatttttaaaaatttacccattgtaagcgtacagtacaatgatgtttagtaaatttatagaattgcacaaccatcaccaagatccaattttagaaagttccattgagctgcctggtctgcagtcagtccattcccactcccagctctaggcaaccactgatctgctctgtgtctccatagattttccttttctagaaatttcatatagatggaatcatacaatatatggtctttcaggtctgacttcttttatttagcatagttttttttcaggttcatccatattgcagcttgtatcagtcatttgttcctttttactgtcgaaaagtatttcattgtgtgagataaattacattttttgtatccctcacgagttgatgtacatgtgaattgtttccagtttggggctactatgaattataccctaagaacatttgtatatatgtctttgtatgaaaatcattctctttgcagattccatgttcatttagatcagattatacatgtttttaattatttttaaatgaatttttaaattacaaaatataatcagaaagaaatgccagcttcctgggaatagggatattgttttgttcactgttgtgtttccagtccctaagtgtctgactgaaaaaaaaaacaaaactgtggaataaatgtatgtaacacaccaaataactgtattcagagtctcactctgtcatccaagctggagtgcagtggcactatcagggctcactgctgcttagacctcctaggctcaagtgatcctctcattccagctcccaagtagctgggactataggcatgccccaccatgcccaggtaattttttgtgtgcatgcagatggggtcttgctttgttgcctaggctgggctggtctcaaacacctggactcaagtgatcctcccgcctcagcctcccaaagtgctggattacaagtatgagccaccatcgccagcccgtaagtgtgtatttgcttgatttatataaaaagtaaattagctgggcatggagctcatgcctgtaatcccagcactttgggaggccaaggtaggaggacagcttgagcccaggagttcaagatgaacctgagcagcatggcaaaacccatttctacaaaaaattagctgggcgtggtggcacacacctgtagttccaacttcctggggtgctgaggccggaggattgcttgagccctggaggtcgaggctgcagggagctgctattgtgccactgtatttgagctggggcaacagagtgagattctgtctcaaaaaaaaaagtaaattaattaaaaatgtaataaacagtgcttcctgatttttatggaggttgactttgtgtgtgcattggagttttgaaggtgccatctcaggcaattcacccccgaggagggaaacatggttctcagtgcagctgggagagaccacagggccaatgaagggccattttcaagttgagagttatgaggctgacttgcactgatgggaatgaaccagcagggagaggagaaagagggtggtttccataagcaaagtcattgagaagctccaaagagatggagtgtggagcagtgcactcaccctgtggtccaagaacctacagcatcagcctcaaccaggagcttatcggaaatgcaagtcttgaggccccacaccatacctactgatcctacacctcacgggtgggcccagtgctgtgttttaacaagctctccatgtgactctcacacatgctaaagtttgaatagcaccgaccatcctagggcacgactgaaaaggtggtctagggcggatattctactagcaggtccttgggagttgaccaaactgtcacttgtccctgaacccagctattgaaaggacctagaggaacatattcaaaccacattcctgggtatcccaactcaatgaattccatgtctgctcacctgcgtcattcttgggcacagtccccttatgaactttcttatacagaatcacacagagggtcacgatcagaaggaacagcagcacctgattaactgaaatagaaatggaaacacattaacattgaacctatgaacctgaaatcacgtgacaaagtttagaatggtagtgcgagtaggtgccttccatgacacagaggagtggtatctgagacctttctataagcagacagcatatagaataaagaattaacctggccaggtgtggtagctcatgcctgtaatcccagtactttgggaggccaaggcaggtggatcacctgagctcaggagtttcgagaccagcctgggcaacagagtgggaccctgtctcaacaacaacaaacacacacacacacacacacacacacacacacacacacacacaaattagctgggcgtggtggcatgcacctgtagtctcagctactaaggaggctgagataggaggatggcttgagcctgggaggtggaggctgcagtgagccaaaattactccagcctgggtgacagagccagaccctgtctcaaatacaaaaacaaacaaacagaaagaattaacctggaacactattgttgctcaggggtcttgcatctttactgaatttgtatatcagttctaatagttttttgctggagtctttagaattttccaaatataagattatattggccagttgtagtggctcacacctgtaatcccagcactttgggaggctgaggtgggcagatcacatgaggccaggagttcaaggccagcctgggcaatatggtgaaaccctatctctactaaattatacaaaaattagctgggcgtgatggtgcatgcctgtaatcccagctatttgggaggctgaggcatgagaattgcttgaacctgggaggtggaggttgcagtgagccaagatcacaccactgggcaatagagcaagaccttccttccaaaacaaaacaaaacaaaaacgtatcatctgcaaacaggataatttgagttcttcctttccaatttggatgccctttattttttttgcttgtctgattgctctagctagggcttccactactatgttgaataacagtggtgaaacgcagccatccttgtcgtgttccagatgtaagaggaaaggctttcagtttttccccatttagtatgatactagctgtgggtctgccgtatgtggcttttattttgttgaatttatgtgattcttcttatgagccagtagtaattataaatacatgttcttagccattatgacacagctgcttttcagttaattcaacccttggtcaaggatgatgtgcaggccgggtgtggtggctcacacctgtaatcccagcactttgggaggccaaggcaggtggatcactggaggccaggagtttgagaccagcctggccaacatagcaaaaccccatctctactaaaaatacaaaaattagccaggtgttgcgcatgcctgtagtcccagctattcaggaggttgaggcaagagaatcacttaaacctgggaggcagaggttgcagtgagccgagatcatgccactgcactccagtctgggtgacaaagggagactctgtcaaaaaagaaagaaggagagaaagaaagaaagaaagagagagagagagaaagaaaagaaagaaagaaagaaagggagagagaaagaaagaaagaaagaaagaaagaaagaaagaaagaaagaaagaaagaaagaaagaaagaaagaaggaaggaaggaaggaaggaaggaaggaaggaaagaaagaaagagaaagaaaagaaagaaagaaagaaagaaagaaagaaagaaagaaagaaagaaagaaagaaagaaaaataaagagagaaagaaagaaaggaagaaagaaagaaattcttgccctggtaaacagaagacctcaatgcctccaagcctccagctctgtttgttccagtgatgttggcccttgagatctgttgagaagtagagtggtgtaaaacagtgttttcttgagtatggaacatatagcactggttgtgcatgaaatgactgaggaagttcatgttcatagcattaatatttaatcagcatatgagaaagtcaatctttctgattttatgtgcaggaacacaacaaaagctacccagagttgaatcacattctcctaattgtatatgtgtttaaagctaccttttttttttaatgataggaaatcattctgttttcatttgcagtaaggataaaaactttctattatgaagtacacttataaatttttaaaattagtcaaagaaaacaaaattggttttgagatggagtttcactcttgttgtccaggctggagtgcaatggcacagccttggctcactgcaacctctgcctcctggattcaagcgattctcctgcctcagcctcccgagtagctgggattacaggcccccaccaccatgcctggctaatttttgtatttttagtagagacagggtttcaccatgttggccaggctgatcttgaacttctgaccacaagtgatcctcccaccttggtctcccaaagtgctggaattacaggcatgagccactgtgcctggcctaaagaaaatattaagaaatgtttaggacagaaggaacacagctgatgaaaaattgagaagatggcatgttggcatgtgtagtgcacacctacctaaagtttgggaaaagttggtagaagggaagagggtgtgaatttgaagtcagactcaaatctcttttctaccacctcctagctgtatggccgaggggtatcttaacctctctgagcttggtgtgcttatctgctgaatgaagattgtaataataagcattacctcgcactactgttttgagagttaaccaaggcaatgcaggcccaataaagactttacaaatggttatgcatcattgttattattattttatctttttttttcttttttgagacagggtctcacctcagttgccctggctggagtgcagcagtgtgatctcagctcactgtaacctcaaccttgcaggctcaggtgattctcctacctcagcctccgaagtagctgggactatagacacatatcaccacacctggctaattttttgtattttttagtagaaacggggtttcaccatgttgctaaggctggtctcgaactcctggactcaagcaatccacctgcctcggcctcccaaagtgctgggaatacaggcatgagccaccgcacctggcctgtattattttttattatttttatgcatcaagagacttaatctattgacttcatatgcatctattttttggcctctatgcctttgtcttcccatttgtaaaagagtcttcgtggatgccctccaaagctacatcctgaggctgtgattctattttgctgacacccagttcctccctgccttaatggattatcagattcagccagggacaatcagatactagactccatttaaaacaaaactacagagaagcagaaaatggacagaaaatggacaaaattctacagtttatcaacaggcccgattaatattcacctgccacggccgggcgcagtgcctcacacctgtaatcccagcactttgggaggctgaggcgggtggatcacttgaggtcaggagttcaagactagcctggctaacatggtgaaaacccatctctactaaaaatacaaaaattacccaggcaagtatgtctcatgcaatatttgggacatacttatactaaaaaattatttgttgtttatctgaagttcaaatttaactggttgtcctgttctgagtctttgtttgctgaatctggcaactctaccctgagggtcacagaattaggttactatgtttctcctcaaattcacaaactactggatctaaaatcagaggcaaatccaggttctgatgggtatgaagattcgagatgactctttaagactaagaacgcaaaattacaaattacaaatgctaaattagctatgaacatgaatatttattccgaacgagaaaatgcattatttttgcaagttttatagaaatatatgatccctgctgtaagttcacttccacttcttcttctttttttttttttttttttgtgtgtttgagacagggtctcactctgtctcccaggctggcatgcagtggtgcaatctcagctcactgcagcctctgcctcccaggctcaagtgatccccctgcctcagcctcccgagtagctgagactacaggtgtccgccaccatgcctggctaatttttgtattttttgtagagatggggtctctccatgttacccaggctggtctcgaactcccgagctcaactgacccgcccacctcagcctcccaaagtgctaggattacaggcgtgagccagtgcgcccagccgataagtccacttctgactaaaatactgaacaactctccatgggaatcatctggaaatgatgatgccaaaaagtgcctgtgggaaaactatccatgaaaatcaaacacaatccaagaaagaagaaaagagccaagccccagcctcaaaaccatcctcccaaatatgtttttaaatcattattttcaaaagttgaaatcttactttttcgtaacagagccatgtgtattcacgcggataagaactgtaacctgtggattaaaggaaaaaaaatctgtttaaaggagaatcaacttaaaactcatcaacaagtgttaaggactatgccttccctgaaagactgatatatcgtgaagtgtgtgatcattttttactgctccaaatctaaaattttggaaacaaaataaatactagcccatgtcttcaaaagcaatgcctctggttgaacaaaccttactaagggtcctcaaaagctaatcttttgtcttcagaagttctttctttcttttttggtgatagagtctcgctccatcacccaggctggaatgcagtggtgcgatcttggctcactgcaatctccccctcccaggttcaagcgatcttccttcctcagcctcccaagtagctggacctacaggcatgcaccaccacacccagctaaattttttttgtttttagtagagatggggttttgccatgttgcccaggctggtctcgaactcctagcctcaagcaatccatccatcttagcctcccaaagtgctgggattatagatgtgagccacagtgcccagcccagaattttttttaacctcttgtaaaaagagctctgtcagccttctgggtcagcagagcagatggcagaaactggaagtatcacactagatctccctgatctaaaatatcaaccctatgccatctttctactatcataacttcgttcctcgataaggcagattttacatcttcaagaatcccttggaggggcatgcattatactcaattcaatcattcattcagtatttacatattgagatcctactaaaagcccagcactgtgccacttcccagtgatgcaccgaaaaacaaaacagtactggtccctatcctcctgaagcttttggtccagtgggggaaacagatattaaaatgtgacacataaaagtattagattatggtaagtgctatgaaggaagcaaaggagatgttgggataaagacgaacaagggtagggagtgcatcaggaggagaaatcaggaaaaacttcattgaggagatggcattggagggaaagaagagcaagagccagtcaagggcagaacatgcagaggagcatcccaggcagagggaacagcaagtgcaaaggccctggggctggaaagagctctaagtattctaggaactgcaagaaactcaaactggctggatcatagtggaccaaaggagagactggatggaagaggtcagagaggtaccaaggggccggatactactgtgcctgaagaggagtttggattttattttaagtgcattaaaccccctccatcagtgtttaactttgttaaagccctaaagcactgtttttcaaacattcccaagggaattctgatggtaaaggagagtgaatactcaacattgctcacaatgagctcaaagtatctttcatgttttttgttttaccttcaaattcatgggaactgtgcaagaatgtagtggaaaggaatcactcctttaactgctggcagagttcccccctcagggagaaagctatctgttatgaaagcaaggtcttctgtgcctaggtgggatggctaggtgagagcagggaaaagctaacctggtctgaataagggatgaaccgaatcctaaggttcggccacagcccaagaaaaaatgttattagaggaaaaggaaaagtccaagtcacttaccctggagaacttcctttcctatggcaggcccagggactattcaagaacagatgtccaatactcagctcacaatcttcttccacgctctgcaccttctaacctcagcccacctccacgctgctcttcccacaggacctaaagtgacattttaagtgttttactgggcgtggtggctcacttttggaggccgaggtgggcagatgcttgagcccaggagttggagacaagcctgggcaacattataagaccccccctgcaacaatctctacaaaaaaatacaaaaattagcaggcatcatggtgcatgcctgtagtcccagctactcgggaggttgaggaaggaggatcacttgagcccaggaggttgaggctgcagtgagccatggctgctgcactccagctgggagacagagcaaaaccctgttttaaaaaagaaaaagaaagaagacagagaagaaagaaaagaaaagaaagagagaaaggaaggaaggagaaggagaaggagaagaagaaagaagaagaagaagaagaagaagaagaagaagaagaagaagaagaagaagaagaagaagaagaagaagaagaagaagaagaagaagaggaagaagaggaagaggaagaggaagaggaagaagaagaagaagaagaagaagaagaagaagaagaaaaagaagaagaagaagaagaagaagaagaagaagggaaagaaagaaagaaagaaaaaaaaagaaagaaagaaagaagaaaagaaaagaaaaaaagaaaaactgctcctttcagaagagctgccatatttgtcgtgtgtctttttgtagccccaagtcacagcaataatattccaggggatggtcactgtgggatgagaaagtttatctcatcccacagtaggatgtttatctggtcccagataaatatcaggagagggcaggctttcagagtgactgcaaggagaagggaacacaaatggaaagaaagagatccctggaagaaaggctggaggactgtcagggacagatttgcgatgagatatgcctgtttcacattgttatacacgattaaagtaattaaaatacacacctctacccaacttcaagtaacccaatattaaaaggcctttttgtctctgtgttgaagattacagaaaatatagaggtcagctggtagaaaaagggagatttttttcagttgatagtcttacaggacttatattgaacatatttaataactcatatggcccttggcactgatcaatcaaaatgggtaccagctataaatggctggcacagccccacacgagtgttctgactaataaatagcagctttggcatctacagaatgtcaaatcatactaatgtattatctattcatatatataagtaagcacaggagattctacacacacacacacacacacatgcacacacacacacacatgcacacacacacacgatgcattatattttgctaagcagcaagaactataactgtcacatcatcaaccattctcatgttctatcaggccaactttttacataaagtcctttgcataagaaaaatgcagggcaaattctaagaggcatattaactagatgtattccaagaacaacttcttttaacaaaagagaccagctgctgcttcagagcataaagaattggcccatgagaactatttttctgccaaggtatttgatacatgttgacaagcaaatttttttccagtcttctggatttacacgtatttcctactgtgagtttctttcttgatgttcttaaaaattgctatgcatcagggggagggagagcatcaggataaatagctaatgcacgtggggcttaatacctaggtgatgggttgatagatgcagcaaaccaccatggcacacacttaactatgtaacaaacctgcacattctgcacatgtatcccaaaacttaaaataaaataaaattttaaaaaattgctatgcatactatttcttttttattaggtagtattttctaaattctttagactgcattgaagaatcagaaagagtgcttcacccaggggaacacaaatggttctgtataataaacattcagtatgtctgttttcattttaaataggcttcttttccatgacacatttactaaaggaatattaccatgtcagcttcaaaatttgacaagctgatttttaagtttttaaaaatttacatacattagaatttccttttttttctatagttctatggacttttacacatgcatagattcttgtaacgaccaccacaaatggggtagagaacaatgccaacactcaaagaattcccttgcaccgccactttgtagtcaggccctgcccaacacccagcccttggcaaccactgataggttctctgtctctgtagttttgtcttttccagaatgtcatataaatggaatcctacaggatgtaatattttgcgagactttcttctttcaattagcataatgtttttgagattcatactagctattgcctttaccaatagtttgtacctttttattgctgaatggtattccgttgaatggatataccacagtttatccattcacccactgaaggacatttgggttgtttccattgttttgtgattatgaataatacttctgtaaacacttgtttacaggtttttgtgtgaatagagggtaactacctagaagtggtattgctgggtcttttgggtagatatatatttaactctataagaaattgccaatctaggctggctgccgtggctcatgcctataatccctgcactttgggaagccaagatgggaggaccacttgagctcaggagttcgagaccagccctggcaacatagtgagacccctgtctgtatgaaagcaaaacaaaacaaacaaaaaaaccctcaaaaaacaaatgtggggagttagagaaaaaaatttagccagacatggtggtgggcacctgtggtcccagctattcaggaggctgaggtgggaggattgtttgagcctggaggtcgaggctgcagtgagccatggtcgcaccactgcactccagccccggtgacagagagagaccttgtctgaaaaaaaaggaaaagaaaaagaaagaaactgacaatcttttttcctgagtggaaacattttcattttgtattcccactagcatggtgagaaagttccagttgctctgtgttcttgtcagcacttggtattgccggtattttttttattttagctgttataatgggtgaattgcattgtgattttaatttgcatttccctaatgattactcacgttgagcatctttttgtgtgtttatttaccatccacatgtggcgaaatgtctgtttaaatcttttgtgcatttttatagaattattttcttatttttgagttttgggagttgtttatatattccgcatacaagtcctgtgttaggcctcagtgctgtggctcatgcctgtaatcccagcactttgagaggttgaggctggcagatcacttgatgtcaggagtgtaagaccagcctggccaacatggtgaaaccctttctctactaaaacacaaaaattaaccaggcgtggtggtgcaggtctgcaatcccagctactcgggaggctgaggcaggagaattgcctgaacctgggaggtggaggttgcagtgagccgagattgtgccactgcactccagcctagacaacagagtgagactttgtcaaaaaaaaaaaaaaaaaaaaaagccctgtgttacgcgatttgcaaatactttcccctggtatgtgacttgtcttttcagtctcttaacaataaattttgcagagcaaaagtatttaattttgatgatgtcaaattcattttatttttttctttttttttgaaacagggttttactccatcacccaggctcaagtacagtggtataatcttggcccactgcaacctccacctcccaggctcaaacgattctcctacctcagcctcccaagcagctgggactacaggtgcacaccactgcacctggctaatttttgtattttttgtagagatggggttttgccatgttgcccaggctggtcttgaactcctgagctcaagtgatctgcctgccttgacttctcaaagtgctgggattacaggcatcagccaccacacctggcctttttttcttttatagatcatgcttttggtatcatatctaataaattttggcctaacctaaggtcatgatgactttctcctatgttttctgggagaattttatagttttggacttaatatttacattcagagttaatttttgtatatatcatgaaatgtagattaaacttaatcttttagcatatggttatccagttgttccaagaccatttgttgagaaagccatttgttgagaccatttgttattccttctgtggaactgatttttttctttaatattttgttccaatttcagggtattcaaaggggacttcaaatctggcaaggagtttgaacctagaggatgacatgtgtcccaaagaagggagcaagtgatccacacaggttttttattatctcctatactttctacaggaagaattacagatatgattagtcatcagtgactaaaaagtgagctacatcatcaaataaagattcaataatgtggccaggtatggtggctcacaactgtaattccagcactttgggaggctgaggctggcggatcacttcaggccaggaatgcaagaccagcctggacaatatggtgaaaccccatctctactaaaaattcaaaaattggctggacgtggtgggccacacctgtaatctcagctactcgggaggctgaggcacaagaatcacttgaacctgcgagaagggggttgcagtgagccgagatcacaccactgccctccagcttgggcgacagagcaagactctgtctcaaaaaaaaaaaaaaaaaattcaataatgttctcagagtactatcaggaccaagcaggcaagaaaagggttgatctaccatgaaaaactttcaaccaaacatttccccaaattctaattcgatctttgctttatattctggagtattttatttgtgctctgaaatcaagaaggctaagacaccctccctctattctcgaaatatacctgttaagactttgtttcccggttttcccaatttacaatgtatctatctatatgcttaatacaataccttggatattcattaggagaagtggtaggcattaagcaaagcataggataggacaggtttgatgaaaaaataaaatttaaccattagataaggattttagatgacaacattcattttactgtaaaatctaaagttaaatattgtcacatttttatggtcattcacttgtttgtgacattttgccaattaccccaggagttggcaactgacttcctctatctcacacaaaaaaagttaatttgccatgaaaaacaatttgtcttgaaaactcaaagtttgttttaaaattaagttgatccttcttaactatggtctttaaaaggaacttctgaacttgacatttgacgggaggctgcagactgcaaaccaggaataataacctttagaaactaacaacatgacagagatagcccgaggaggtaattgagaaaggaaggatatcataggtccccacagtttcatgaaccaaagtgttatgagaatttgctggcagtcatctaggaaaactcttcaacagagatttgattcaactctttaattcactgtaaacaaccagctacaatgttccttttattttcccgggctatagactgaacacccaagagctttgagtgcatggcaatgacccttctcctcttccccttttgcacctggaaaagaaatgggtcaaaacagcacactacttaggatttttctgagatagggtttcaggtaccttttatccatttaggattttaggtgatatgtatgcatctaactttcggggatgatggaagcctagaatggtctttggccatgtggctcctcctcccactccatgaaagaagccatctggtatcacaggagagaacggggcaaagaccagaaggaagctgagctctaagtccctcaggccatccacttcctggacatcctagttatgaaaaccagtaacttcacaatttttccttaaactgttttgaaatgaggttcagtttcttacaaacaaaagtctttacaaataaatttgctgtggccagaatggtgtgtgaatatggggagcagtttgtaggggtcagataataatcatagctatcatttattgcgaatttaatttgcacgcagctccaggctatttaggtacattatctcctttaattctaacacctttcaagtggatgtattactatctccatttttcaaatgaggacattgtggctcggagaggttcagtaacttgctcaaaatcataaatcttgtaaatgatggggctgggattaaaaattagagctctctgacttcaaagcccttaaccacaaagtgctgagctctcaaagggcccttgcggctacaccagaggttaggagaattggggtccagataacagatttcaccgtgtgttgatgaagctttacagctcacaggcaatgctggtcagctctttcctgagtgctcggttactgtaactatgagaccactccagaggcagaggaatagtaaatgctgattcatctgaacagggggttcatctttccccgtccagtgtgttgccaactctgaaatctctttaagatgaaacaagaagctttaggatgcagataatcgcatgccaattgcaaggcacagcagtaatgagccaagaaggtaagttcccgaagctgattattgtaggaaaccttaagccatatggcaggagtggtgtccttgagaagcatgcagtttcaacagaaagtttgctttaaaaaatgatgtgtgtgtgtgcatgtgcgtgtgtgtgtgtgtataattgcataaagatttggcatgcctgaatttcatcctatccttcctttttacaatttcatctcatctctgatggtggcacttcctgggtttcaaaaaacaaaaaaatcccaagtggacaagacacagtttctgactgagggcactaaagtcaagtggaaaatcatgtggaaatccttttccagtacaattagtgtattaaactgtgggccttggagtcagaccacctgggttcaaatcctagctgcacaatgtataagaaccatataagaaccccttcccttggaaacttaagattcctcacttataaaatgtctgtaataccattttacaatcaacatgttaataagtaattcaggcaaaaaacctcaatgaatgctaaagtgatagggggtaaaatgttgttggggtacagaaaattcacattctcaaagtaatcacacttaagatcaacaaaatgaaacaaattgaaatcctgtgccttgaggtgtgacaaatatcaatatgttcctgccagtgatatttaacctgattctatcatggataacgtcatggtcaaatccaaatcatggatcattctgaagacgaactgccctggtctcttcaaatatgtcaatatcatgaaaggaaaaaaaaaaaccacgttgggaactctataagcttgataatgtaacaatgaaatggaaagtgtgaaccttggctgggctcagtggctcacgcctgtaatcccagcactttgggaggctgaggcaggtggatcatgaggtcaagagatcgagaccatcctggccaacatagtgaaacaccatctctactaaaaacacaaaaattagctgggcatggtggcgtgcacctgtagtcccagctacttcggaggctgaggcaggagaatcgcttgaacctggaaggctgaggttgcagtgagccgagattgcaccactgtactccagcctggtgacagagtgagactccatctcaaaaaaaaaagtgtaaaccttgactgcatcctgaaccaaatgtttaaaaagagctacaaagtttatttttgggaaattggggaaatattatggcattaatgttaaatttcctgagagaataaatgtggtatggttatgtaggagtatatcattgatagtaggagacacatacattaatttaggggtgaaaggtcaagaggttcagggttgtttgtgtgtagaaagagagagagtgagaggtactgagacaatgctaatgtggctaaattggttgagccattatactcttcttgcaacttttctataaattaaaacaatttctaaataaaaagttgaggaaatgaaggtaatataaggctttatgaggattaaatgcagtaatacatttacatgcattaagtacttacaacagtacttggcaaacagttggaaccccacttatacaagccattatgatcgtgtgattctagggaaataactccatctctctccgtctcagtttcctcattattatgactgaagcagacaattctattagatctaacattctagaactttatatagttatgccctcaaaaaagtgatgggggttgaaagaatcaacattgtcaaaatgtctataacacccaaagcaatctacagatttaatgtagtccctttcaaaattccaatgacatttttcacaaaaatagaaaaaaaaaatcctaaaatgcatatggaaccgcaaaagcccccaaataactgaagcaattttgagcaggaacaaaactgaaggcatcacatttcctaattttaaattatatttacaaagttatagtaatccaaaaagtatggtactgacataaaaacagacacatagatcaatggaacatagaccaatgggacagaatagagggcccagaaataaatccacgcatatatggtcaactattcttccataaggcacaaagaatacacaatggggaaaggatagtctctttagtaagtggtgctgggaaaactggatattaacaacaaaaaaattggatctttatcatacacaaaaccagctcaaaatgaattacatattaaataagtaattattcatttttattatttattaatttaataataacataattaaatgtgtaagatgtgaaactgtaaaactagaagaaaacagggggaaagctctgtggcattggtcttggcaatgattttttgaatatgacaccaaaagcacagttaacaaaaacaaaaacaaacaagtgggactacatcaaactaaaaagtttctgcactgcaaaggagcaatcaataaaataaaaaagcaacctgtggaatgggagcgattatttacaaaccatatacctgataagaagttaatatccaaaatatataagaaactcatacaactcaatagcaaaaaaacaaataacttgatttaaaaataggcaaaggactccggaatctgctaatcccagtcggtgccgcatccccagcccgccgccatggccgcctacaaactggtgctgatccggcacggcgagagcgcatggaacctggagaaccgcttcagcggctggtacgacgccgacctgagcccggcgggccacgaggaggcgaagcgcggcgggcaggcgctacgagatgctggctatgagtttgacatctgcttcacctcagtgcagaagagagcgatccggaccctctggacagtgctagatgccattgatcagatgtggctgccagtggtgaggacttggcgcctcaatgagcggcactatgggggtctaaccggtctcaataaagcagaaactgctgcaaagcattgtgaggcccaggtgaagatctggaggcgctcctatgatgtcccaccacctccgatggagcccgaccatcctttctacagcaacatcagtaaggatcgcaggtatgcagacctcacagaagatcagctaccctcctgtgagagtctgaaggatactattgccagagctctgcccttctggaatgaagaaatagttccccagatcaaggaggggaaacgtgtactgattgcagcccatggcaacagcctccggggcattgtcaagcatctggagggtctctctgaagaggctatcatggagctgaacctgccgactggtattcccattgtctatgaattggacaagaacttgaagcctatcaagcccatgcagtttctgggggatgaggagacggtgcgcaaagccatggaagctgtggctgcccagggcaaggccaagaagtgaaggccggcggggaagatactgtccccaggagcaccctccctgcccatcttgtccctctgcccctcccacctgcacatgtcacactgaccacatctgtagacatcttgagttgtagctgcagatggggaccagtggctcccattttcattttagccattttgtcgcctgcacccactcccttcatacaatctagtcagaatagcagttctagagcacaggttctcagtctaagctatggaaaagctccccttatccaacagagtttaaaagtagtgacttgggtttttgcgagtgctttgtttactaaggactttggggaggaaccatgctaagccatgaccagtgaggagaagcaacagagcctgtctgtccccatgagcggagtctgtcctctgctcttctgcagtcaggtcactgcctactgcctgggggctctagtcattccagtggaagacgaatgtaacctgcgtggtgatgtgacaactgtttcctccctgaccccagaggatctggctctaggttgggatcaatcctgaatttcgttatgtgttaatttacttttattaaaaaagtatagtatatataaataatacaaaacaataacccttctggggtttcttgtggcggttgaaatagtcccacatgtggtcatcagaaaataagccattcctcataccaatataggatcagctccttgacctctgaggggcaggagtgcttcctggtttgtgtattagaatcccttcctgccttgtttcatggcagtgaaatgcctcttggtcctgtccaagtgtatctttcactgatttctgaatcatgttctagttgcttgaccctgccacatgggtccagtgttcatctgagcataactgtactaaatcctttttccatatcagtataataaaggagtgatgtgcaatagcaaaaaaaaaaaaaaaaaaaaaaaaataggcaaaggaccagaatagacatttctctaaagaaagcacacaaatggccaagaggtatatgaaaagatactaaacatcactaataatcagggatattcaaatccaaaccacaataggatatcacttcacatctgttagaatggctattatcaaaaagtcaaaagataacaagtgttggtgatgatgcagagaaaagggaacccttgtacattgctagtgggaatgtaatttggaacagccattatggaaaacaatatggaggtctctcaaaaaattcaaaatagagctaccatatgatgcagctatcctactttagggtatatatccaaaggaaagaaaatcagtatcaaagctagatctacactctcaggttcattgcagcactatttttttttttttttgagacagtgattcgttatatcgtcacctgggctggaatgcagtggcacaatcttggctcactgcaacctccgcttccggggttcaagcgattctcctgcctcagcctcccaagtagctagaaatacaggtgcacatcaccatgcccggctaatttttgtatatttttagtagagacagggtttcaccatgttggccaggctggtctccaactcctgacctcaggtgatctgcccacctcagcctcccaaagtgctgggattacaggtgtgagccaccgcacccagcccgcagcactattcagaatagccaagatatggaattaacctgtgtccataaatggatgagtggataaagaaatgtggtatatatatgagtatgtgtgtgtatgtagacatatatatgcacaaaataaaatattatttcaccttagaaaagaagaaaatcatgccatttgtgacaatatgggtgagcctggaggacattatgctaagtgaaataagccaggtaaagaaaaatgaatacagcatgttcacttatatgagaaatctacaaagttgaacttacagaaacagagagtagaagggtggttaccagggacagagaggtggggaaatggggaaatgtcggtcaaagggtacaagcttgccgttataagatgagcaagttctggagacctaatgcacagcatggtgactgttattactaataatgtattgtatacttgaaatctactaagagggtagatcttaagagttctcactgcacatacgcaaaaggcaactacgtgagggtgatggatttgttaattagcttgattgtggtaatcatttcacaatgtgtatattaaaacattgtactccttgaaaatatatatatatgtgtgtgtgtgtgtatatatgtgtgtgtgtgtgtatatatatatatatatatgtatatattttttttcagagacaggattgtcacccaggctggagtgtagtagtgcaatcatagctcattgtaaccttgagctcctgggttctatcaatcctcccaccttggtctcccaaagcactgagattacaggcttgagctaccagggttggctgaatatatacattttttatttgttaattatacctcaataaagctgaagaaagcaaacaaaaaactcttatttgagaactaatatttgataaaatgttcttatcaataactttatgtcattttaattattcagacaatatttacaagaacatgcttacttccttaaaaattatgtatgcctggattccattccaagatggctgaataggaacagctctggtctgcagctcccagcgtgattgatgcagaagatgggtgatttctgcatttccaactgaggtacctcgttcatctcattgggactggttggacagtgggtgcagcccacagagggtgagccgaagcagggcagggcattgcctcacctgagaagcccaaagggtcgggggatttccctttcctagccaagggaagctgtgacagactttacctggaaaaacgggacactcccacccaaatactgcacttttccagtggtcttagcaaacagcacaccaggagattacatcctgtgcatggcttggtggggcccatgcccatggagccttgctcactgctagcgcagcagtctgagatcgacctgcgaggcagcagcctggcaggtggaagggcgtccaccattgctgaggtttgagtgggtaaacaaagtgggtggggaagcttgaactgggcagagcccaccacagctccgcaaagccagctgcctctgtagactccacttctgggggcagggcatagctgaacaaaaggcagcagaaacttctgcagacttaaacatccctgtctgacagctctgaagagagcagtggttctcccagcatggtgtttgagctctgagaacagacagactgcttccctcagtgggtccctgacccccatgtagcctaactgggagacacctcccagtaggggccaactgatacatcatacaggtgggtgcccctctgggacgaagcttccagaggaaggatcaggcagcaatatttgctgttctgcaatatttgctgttctgcagcctccgctggtgataccgaggcaaacagggtctggagtggacctccagcaaactccaacagacctacagctaagggacctgactgttagaaggaaaactaacaaacaataaagaatagcatcaacaccaacaaaaaggacatccacaccaaaatctcagttgtaggtcaccaacatcaaagaccaaaggtagataaaatcacaaagatggggagaaaccagagcagaaaagctgaaaattctaaaaaccagagcgcctcttctcctccaaaggatcacagctcctcgccagcaatggaacaaagctggacggagaatgactttgacgagctgacagaagtaggcttcagaaggttggtaataacaaacttctccaagctacaggaggatgtttgaacccattataaggaagctaaaaaccttgaaaaaagattatacaaatggcaaactagaacaaacagtgtacagaggaccttaaatgacctgatggagctgaaaaccatggcacgagaactatgtgatgcatgcacaagcttcaatagccaattcgatcaggtggaagaaagggtatcagcaattggagatcaaattaatgaaataaagtgagaagagaagttaaaagaaaaaagagtaaaaagaaatgaacaaaacctacaagaaatatgggactatgtgaaaagaccaaatctacatttgattggtgtacctgaaagtgacggggagaatagaatcaagttggaaaacactcttcaggatattatccaggagaacttccccaacctagcaaggcaggccaacattcaaattcaggaaatacagagagcaccgcaaagatattcctcgagaggagcaaccccaagatatataattgtcagattcaccaaggttgaaatgaaggaaaaaatgttaagggcagccacaaagaaaggtcaggttacccacaaagggaagcccatcagactaacagcagatctctcagcagaaactctacaagctagaagagagtggggggcaatattcaacattcttaaagaaaagaattttcaaccaagaatttcatatccagccaaactaagtgaaggagaaataaaatcctttacagacaagcagatgctgagagattttgtcaccaccaggcttgccttacaagagctcctgaagggagcactaaacatggaaaggaaaaaccagtatcaaccactgcaaaaacatgccaaattgtaaagaccatcgatgctaggaaaacactgcatcaactaatgggcaaaataaccaactaacatcataatgacaggatcaaattcacacataacaatattaaccttaaatgtaaatggactatatgtcccaattaaaagacacagactggcaaattggataaagagtcaagacccatcagtgtgctgtattcaggagacccatctcatgtgcagagacacatacaggctcaaaataaagggatggaggaagatctaccaagcaaatggaaagcaaaaaaaaagcaggggctgcaatcctagtctcggataaaacagattttaaaccaacaaagatcaaaacagacaaagaaggccattacgtcatggtaaagggatcaattcaacaagaagagctaactttcctaagtatatatgcacccaatacaggagcacccagattcataaagcaagtccttagagacctacaaagagacttagactcccacacaataataatgggagactttaacaccccactgtcaatattagacaaatcaatgagacagaaggttaacaagaatatccaagacttgagctcagctctgcaccaagtggacctcaatagacatctacagaactctccaccacaaatcaacagaatatacatttttctcagcaccacactgcacttattccaaaactgaccacagagttggaagtaaaacactcttcagcaaatgtaaaagaacagaaatcacaacaaactgtctctcagaccacattgcaatcaaattagaactcaggattaagaaactcactcaaaaccgcacaactacatggaaaccgaacaacctgctcctgaaggactactgggtaaatagcgaaatgaaggcagaaataaagatgttctttgaaaccaatgagaacaaagacacaacataccagaatctctgggacacatttaaagcagtgtgtagagggaaatttatagcactaaatgcccacaagagaaaacaggaaagatctaaaatcgacaccctaacatcacaattaaaataactagagaagcaagagcaaacacattcaaaagctaacagaaggcaagaaataactaagatcagagcagaactgaaggagatagagacacaaaaaacccttcaaaaaatcaatgaatccaggagctggttttttgaaaaggtcaacaaaatagactgctagcaagaataataaagaagaaaagggagaagaatcaaacagacgcaataaaaaatgacaaaggagatatcaccaccgatagtaccatcagagaatactatgaacacctctatgcaaataaactagaaaatatagaagaaatggataaattcctggatgcatacaccctcccaagactataccaggaagaagttgaatctctgaatagaccaataacaggctctgaaattgaggcaataattaatagtctaccaaccaaaaaatgtccaggaccagatggattcacagccaaattctaccagaagtacaaaaaggagctggtaccattccttctgaaactattccaatcaatagaggaagagggaatcctccctaactcattttatgaggccagcatcatcctgataccaaagtctggcagagacacagcacaaaaagagaattttagaccaatatcccttatgaacatcagtgcgaaatcctcaataaaatactggcaaactgaatccagcagcacatcaaaaagcttatccaccacgatcaagttggcctcatccctgggatacaaggctggttcaacacatgcaaatcaataaacgtaatccatcacataaacagaaccaacaacaaaaaccacatgattatttcaatagatgcagaaaaggccttccacaaaattcaacagcctttcatgctaaaaactctcaataaactaggtactgatggaacgtgtctcaaaataataagagctatttatgacaaacccacagccaatatcatactgaatgggcaaaaactgaaagcattccctttgaaaactggcacaagacagggatgccctctctcaccactcctattcaacatagtgttggaagttctggccagggcaatcaggcaggagaaagaaataaagggtattcatttaggaaaagaggaagtcaaactgtccctgtttgcagatgacatgattgtgcatttagaaaaccccatcgtctcagcccataatctccttaagctgataagcaacttcagcaaagtctcaggatacaaaatcaatgtgcaaaaatcacaagcattcctatacaccaataacagacaaacagagagccaaatcatgagtgaactcccattcacaattgcttcaaagagaataaaatacctaggaatccaacttacaagggatgtgaaggatctcttcaaggagaactacaaaccactgctcaacgaaataaaagaggacacaaacaaatggaagaacattccatgttcgtgaataggaagaattaatatcgtgaaaatggccatactgcccaaggtaacttatagattcaatgccatccccatcaagctaccaatgactttcttcacagaattggaaaaaaatactttaaagttcatatgaatcaaaaaagagcccacatcgccaagacaatcctaagccaaaagaacaaagctggaggcatcacgctacctgacttcaaactatactaaaaggctacagtaaccaaaatagcatggtactgatgccaaaacagagatacagaccaatgcaacagaacagaggcctcagaaatatcaccacacatctacaataatctgatatttgacaaatctgacaaaaacaagaaatagggaaaggattccctatttattaaatggtgatgggaaaactggctagccatacatagaaagctgaaactggatcccttccttacaccttatacaaaaattaattcaagatggattaaagacttaaatgttagacctaaaaccataaaaactctagaagaaaacctaggcaataccattcaggacataggcatgggcaaggacttcatgtctgaaacaccaaaagcaatggcaacaaaagccaaaatacacaaatgggatctaattaaactaaagagcttctgcacagcaaaagaaactaccatcagagtgaataggcaacctacacaatgggagaaaatttttgcaatctacccatctgacaaagggctgatatccagaatctacaaagaacttaaacaaatttacaagaaaaaaacaaacaaccccatcaaaaagtgggcgaaggatatgaacagacacttctcaaaagaagacatttatgcagccaacagacacatgaaaaaatgctcatcgtcactggccatcagagaaatgcaaatcaaaaccacaatgagataccatctcacaccagttagaatggcgatcattaaaaagtcaggaaacaacagatgctggagaggatgtggagaaataggaatgctttaacactgttggtgggagtgtaaactggttcaaccattgtggaagacagtgtggtgatgcctcaaggatctagaactagaaataccatttgacccagccatcctattactgggtatatacccaaaggattataaatcatgctgctttaaagacacatgcacacgtatgtttattgctgcactattcacaatagcaaagacttggaaccaacccaaatgtccatcaatgatagactgaattaagaaaatgtggcacatatacaccatggaatactatgcagccataaaaaaggtgagctcacatcctttgcagggacatggatgaagctggaaatcatcattctgagcaaactatcacaaggacagaaaaccaaacactgcatgttctctcactcatgggtgggaattaaacaataagaacactaggacataggacagggaacatcagacaccagggcctgtcatggggtgggagcagggggagggatagcattaagagaaatagctaatgtaaatgacaagttaatgggtgcagcaaactaacatggcccatgtatacctatgtaacaaacctgcacgttgtgcacatgtaccctagaacttaaagtataataataaaaaaattatttatgcctgtagaattgctatctttgataacagtatctgcaattcactcactgttattcaaatgagtcagattaactatacatctctttgaaataaaaaacaacaaattgaaaaaaaaatgttttttttcttttgggacgaagtcttgttctgtcgcccaggctggagtgcagtcgcttgatcttggctcactgtaacctctggcacccgggtttacgcgattctcctgcctcagcctccaaagtagctgggattacagacgcgtgccaccatgcccaactaatttttgcatatttagtagagatggggtttcagcatcttggccaggctggtcttgaactcctgacctcgtgatccacccgcctcagcctcccaaagtgctgggattacaggcgtgagccaccacgcccagcctaacaaattgaaaaattaagcatcccattttctaagtactatgagactcgagtatataggtacttttagctttttagatgctgtgttgtgactttactgggtgtaaatttgtaagttcagagttctactgaatgtgagaataaataaatttatttttaacattacaaaagtgattggggagtcagcactgttttctggcaaggtgttagagattttgctattagaatgtaaatatgagttaactagctaaaaatgctaaggggctgggcacggtggctcacgcctgtaatcccagcaccttgggaggcctaggtgggcagatcacttgaggtcaggagttcgagaccagcctggccaacatggtgaaaccccgtctctactaaaaatacaaaaattagctgggtgtggggccaggcgtggtggctcacccctgtaatcccagcactttgggaggctgaggtgggtggatcatctggggtcaggagttcgagaccagcctggccaacatggtaaaacgctgtctctactaaaaatacaaaaattagctgggcgtggtgacaggcgcctgtaatcccagctagtcaggaggctgaggtaggagaatcgcttgaacctgcgagacagaggttgcagtcggccaagatcgcaccattgcactccagcctgggcgacagaaagagactctgtctcaaaaaagaaaaaattagttggatgtggtggcacgcacctgtgatcccagctccttgggaggctgagacaggggaattgcttgaaccagggaggcggaggttgcagtaaacacagatcgcaccactgcactccagcctgggtgacaaagcaaggctctttctcaacaacaacagcaacaacaacaaagctaagatgggataagggcccaacccaggacaagaaggtaattagggggttcccttgacatttctttgattcattcaacaaacatttactcaacctctacgaatataccaggcacccaggcactagagattcaaagataagtccccagttagtccacatttgggggaagggaggggaagacaccagtaaatatataatggcaatacagtgtgcttagatgccttggtagatgtaagcatgggatattgttttagcatcaaggaggggcacctgaccagatcatgggggtcagggaaggctcctggtctccaccaaaccaaaccaagatactccgttcattcttatgtttccttactagaacgcaagctccagggacaggacgggtactacgttaatcatttctgtatttccagttcatggcaagcatttggcacttggtagtgtggcagccttgatagctggctgatccaacagctcttcccatccttttctcctttgcctgtttccatatgagagagaggaaaatccaaataaagattttaccagccttctttgcagctagtagtagccacataatatagatctgatgcacagagacttaagtggaaatctactgggaatatctgagaaagcttttcctttctggatgaagtgtcaactcccccttcctcctgccttgcatggggccataatggctggagctaggcagccaccttgagaccatgagggagaggtcaagagctacacagaatggtcagctcttatgtcatcgaactgctgaatcaatgccatcaatacctacctcctccaaacttcttatgtgacagaatcaacccatgtgtttaagctgccgtaaatcagtgtttctggtatttgaagtcaaagacattccagtagattaagtaggttctcaagaaatttttgcagaactgaagtcctggggataagctgattgtggggaattaagagagggatcagagttataaagaggtagaaaactgataggaagtcagggatagagaactggagaaccaaggaagtgatgctggacagcttaagaatgtgtagggtggggtgtcctatcttctggcttccctggaccacactgaaagaagaattgtcttgggccacacataaaatacactaacatgaaacatagctgatgagctaaacaaaaaaaatcacacacacacaaaaatctcattatgttttaagaaagttgatgaatttgtgttgggctgcatccaaagctgtccagcactgcctgtggcctgtgggctacgggttggacaagcttgaggtagagtaaaaggcagagatctggaaccaagagaaactggaatggggcagagtctgagagaacatcttctggctaacaaggtcccggcatgcaaagaactgcaccacaggacttgttcctcactagggttgaggcatgggtgcgtgagatgcagactatgtgcccgctctctcctccttacatgcttcctgcacgtggcccgggggactcggctcacctgcttttcctccacctttctgatggctcattctcagtctctttcactggttgctcctacctcctgaatatctaaatgttggaacaccttagcgatttcttctcttctttctctaaactccctccttaggagacttcatcctgactcatggctttaaatataatttatatgctgaaaactcccaaatttctatctccaggccagccatctcacatggattccagactccagatgccatttggcatctgcacttatagtaatccacgtgtccaaaactgagcttctggtatttcccccgaaacatgcccttcccataatcttccccaaatcagttcgggtgactccatttagtttttatttttatttttgagatggagttttgttctgtctctcaagctggaatgcagtggcacaatcttggctcactgcaacctccgcctcctgggttagagcaattctcctgcctcagcctccctagtagctgggattacatgtgtgcaccaccacgcccagctagtttttgtatttttagtagagaggcagtttcgccatgctggccaggctgttcttgaactcctgacctcaggtgatccactcaccttggtctcccaaagtgctgggattacaggtgtgagccactgtgcccggctgtgactccgttttttaaattgctccacaaaaaaatcagcttggtgtttccttaacccctctctgttccttattcccatgtgcactgacagcaaatcttgtcagttccactttcaaaatagatccagaatttttaccaccttctgtggctccaccctggcacattagcctttgactatattattctgcctttgtctcccttcagctgattttcaacaaagcagccagaatgaacctgtgaaaataggagtcgcattgtgctgtgctctgttcaaaaccttccaaggccttcctgtctctctcagagcaaaaaccaaagtcattacagcatccttccataaggtatcgcgtgatcacaccggcctccttgccagacagcctcctgcctcagagccttggccacgtgctattcctgctgcctggaatcctcttcccagatatctacatggcttgccccctcatgtctctcagtctcttagtcaaaagcctctaaccccaacaatgcacaaattgcatcccctcagcaattaccatcttccaacagactgcctcgtcatcaccggtgtactggctgccatccaaatgacagactataagccccatgaaggcaggaaattttgtttcattcattgccatacacccagcatctagacaagtgcctggcaatataagccctcagaaaacatttatggaccaaagggatgaatgtgcaactgtctcctcagggtgctgcacaagtatctcaaagcccctacattcacaactgaaattagcacctcccctacagaaactccttctctggggttctcagattcctcttcaacttctccctcctaattcctccttcaatcaccgagtcctactaattacacctctgcaataacctcccacctggccttcctgcctttagaatttctgtacactgcccttcctcaatccatcactggcctaacggccatagtaacttttttgttgttcgataatcatatcaagttcatttgaaacacaaatgcagcttgagtagccttaattttttgtttgatttcctttttctttttttcgcttgaaacatttcaagaccgctgaaaagtctgaagaataaatactcatatacctttcaccagatccaccagttgctaacatgttgacatatttacttaattgaacttcatatgtacatatatatttttggaagttgtaaacatcatgacacttctccccctaaatatttcagcatatctatctttaaaagaaggaccagacagaccactgaggacagcgactgtggcttcctcacttccatctgcctgtcctgccccaaggtgggaactcaataaatgtgtgttgaatcaatgagaatcaggagagagaaagaaaaggcgagaggctcttgttgctctgctcttcagccccagaaagaaaggactcagccagaaggaggggaactgctgatgatcccactccaggaataaaagcagagggctctggtcatctcatcagccttcctgctactgtcacaacaaagagccccagaactgtgccccttacacctctgtgagctttcctagccctagtgacttccgtgtgtgtggtttctctgtggtaataaatagccaagcctttaacaagaaattgcctgcaggcctgtcttcaggacagacagagaggtggagctgggagccactgcagggcaggcaaggcactgggcagtagcatcttcaaagaggggagaaaagaaggttgaggttctagggcctgtgagtaggaagaaaaggagagtacagagagttgttctgggcatgagaagaggcctgtaagtttaaaaataagcccctgaagaccttgcatggggagccattttaccagatgccaaagagtttaggcatgtggccaaacctggaaagaatgttttgagacctggcagtggctaagggaatttgctctgccttggaacaaaaagcaaagtgggaaaggctcttcagaaaaatactccaaaaatcagtgcccctgtgtttcattttacatgccagctctgattggctatggtatgggctgttgggattgctagattgagaagaaatctgaagccatcactagattcagttaaaaaagaaaagaaaagaaagataagaaagaaagaaagaaagaaagaaagaaagaaagaaagaaagaaaaagaaagaaagaaagaaaataagaaagaaagaaagaaagaaagtgattgattaatcatgtctgccatggttatagtatggtagggagtaataggaaatgactgggaatcaaaaagcaagataaaagagggggttcctaaaagtactgttgaatgacttaaatatgagagctgtgtaggttagtggaaatatgggctttatccttagacagagctgactgtgaatcctaattagctgtgtaatcatggggtgacttacaaaaccctatgtgtaaaacgggatagttctgcatattacaaagctattgctacataagtattaactattattattttaacacttacgtagcaattctatgtgctaggcattgttctacgacttttacaaatattcattcacggattatcacaacaactccttaaagttattattccaatacacaggtgagaaaactgaggctcagagaattaagaggtctgctaagggtcacacaactaataagtggcagagctaatatttacacgcaggcatcctggctctgagttcacattcttaaccaccttgatagttactacagccaaccactttccatcgctatggttgctatcactgtgtcaagcaactgacataagctctgtgagttaactctgcaagacttgcaccctgaagttctcaaatgcatagacacatttaacagagcacttcattttaagctatgcaagctacaaagtcattaacaggacaagagtaagaattcactaaaggaaagagaaaggacaagatcaggactcaggagtctgtcctctaacaaaatatctcttgccttttaactttttgctataatgaaaggtttactcaagattcaccaagatacatagaacaggtgtcttactccatttttttttttgacagggtcttactctatcacctaggctggagtgtggtggcatgatcgtagcttactatagcctcgaattcctgggctcaagctgtcctctcacctcagtctcccaaatagctgggacaataggcatgcaccaccaccacatccagctaattaaaaattttttttgtagagacagagtcttgctatgttgcctagtctggtttagaactctgggcctcaagagatcctcccaccttaccctcccaaagtgctgtgattacaggcatgagccaccatgccagcctgaactgggtggcttctaaacaacaaaactttatttcttatagttctggaagctgagaagcccaagatcaaggtgctggcagattcagtgcctggtgggggcctactttctggctcatagatagcacgttctagctgtgtcctccatggtggaaggggtgaaccagctctcttaggccttttttttttttttttgagatggagtttcgctctcgttgcccaggctggagtgcaatggtgcaatctcagctcaccacaacctccacctcctgggttcaagtgattctcctatctcagccttccaaatagctgggattacaggcatgcaccaccacgcctggctaattttttgtattttcagtagggacggggtttctccatgttggtcagtctggtctcaaactcccgacctcaagtgatccacctgcctcagcctcccaaagtgctgggattacaggtgtgagccgctgtgcccagcctcttaggcctattttacaagggcactaatcccattggtgatggtgctgccctcatgacccaaccacctcccaaaaggccccactttctagtagcatcaccttgggggttagagtttcaacatatgaattttggggggacacaaaccttcagaccatagcactaggggtgcaggacaagagagtcttcagtttatagagaatttgtcttgctttctcctgtgctagcatgagaaattctttcacaaaaagcctttagagtaggggtcagcaaactatgacccctggtcaaatcctgcctgacactagtttttgtaaataaagttttgttagaacgtagccatgcttattttttgtttctctgctgttttaatactgcaacagcagagttgaacagttgcaacagaaaccatatggcttattatcaggcccgttgcagaaaaagtttgctgacttctgatctccaatttaggccagattttctatataccagtacaacacacatgataatcttatgtccttaacttgagaaggaaaaacaaggcatccccttggatgagctccagggaaggtggagaataggatgtccaaaagaggaaccaaaatgaaaacaagtgtgtccagaatagcacaccgcagagtgtgctcctagaaatgttaacctacattatgtgataaggtggttcagcgatcaactgtttgggaatcattgcgttaaacaaccttaagaggatttctctactacaggacttctcaggacctttaaaatgctattatgccttgcgatctctaagagggtaatatagttcacagagtttcccatgggactatgttttctcagaactttctttggaaaatgctgaaattaaaaaggatttagaatcattttcctcgggaactagaaatgaaaactatgagggctgtgccttaatgaacctcacattttctcagcaaggaaagaggaagcacaaagaagaaataatgaaagacagaatgggaaataaaagaaagagaggtgtctgaaggaagaaaggaagaaagcaaagtgctggagagatgacatattagggtatgaggaacacttggaccactggactgtcagagggaaccatggtcaaaagcagaggtgttgccaaaaacaggatgcatgatcacttttgtcaccactgccatcatcagcaccatcagagaagctaacctttcctgaggcctaactactttgcaggtcctgtattatgtcctctatagacattaggtcatgtaatttccattttacagatgaggaactagggtgcatgcagttaaacaattcacccggagtcgagcttagaaggtgtgtaagtggcagcatgtagattcagtcctgtaagcctgaccccagagcctatgttcttaccactgcattgcacagtctacttccaagtgcattaaagggagaactggaattccattatgtaatatagaaaggatattacacagaagtgccacaccagaacatttggaggaaaaggaaaagacaaaaaccaaccaatatcactttggatatttggctgcacaggggccaaacaacgagaggactgattttttttttcaaagcacatccagacattcagatatcatcatgttttctttctctcactctctctcaggtttttttttttttactctcatgttaactatccttcttatttcataaattatataccaggcttgtccaatgtgtgacacttgcttataaagtaaacataagatcttttttaatgtttaaaaagcattttcaacccaaacaccacgactactgtatttacaataagcctcacttgggtttccacaacggccagttctttctggggggatggagatcctcagaacagcttcctaaggcagattctgaaaacatgaatcatgctcagttaaataatttgtggctcaggacataccttcattaaataatagcattcatccacatcctaactgctgatttttatgtttaaaatctgatacaaatagtaaattatcatatttgtggagagaaggaggagaaacccaggtctggaaaagcagcccaggatgtgaaaaacattgcacactggatttgctggaaatggccgaaaagggttccgctggaatgctaccagttcggactgggaagtttctgaaggcaaagtttgtgtggggcaatctgacacctctgatttactttcttgggtctgtagcagaataaagaactgctgcagaccggccaggataaaacggaacgactgcacactgctcgtaaatttctctatttacctggtgaatggtgagggtagggctttgggctcctcggtccagaagagctgcaaggcagagcgttcaaatcgtggctggccctgggctgccgccctcacgctgcttcggctgcttctaagatcccattggaagtcccaaagggctggagagccccaaggccaatattacgtttccaaaagaatattcctccccgacccgcactcccctttgcttgcgttgacttcggaacgtctcgggtttcttccacctctgcgcgaagccgctgggaacccaggagttgcgctggcagagaggggcggccccagaaaccacttccagatgtgctcggctggccggctcggatgcgccagacttcctctggctaagtgcaaaacatgcaaaaaacaacgctgttctggaggaaaagacacaaaaccagagaagagcaaatgctttcagggtgaatttctaccacacgttgagtcgaaggcaaactttgaaagaacaccagtgaaaaataaagttcatgctgattttgagaatcttcatggccactagcttctcctgaaatctcctagtcattgaaatgctgttgtccccaaatcaaaacccaggtaacaactgtggtcttcttctaccaaggcaataatgacaaaagtttcaggatggagtgtttttgtgcctgaacaaaagaggaatcagagaggaatgaggcagggagctgggagctgacctcaacagcaatctgcgctgttctgtatctctgcggtgtgttctcaaacccgggagatggtgccagcactttgtctgggatcacagaatttatttctgcaatggctcctcttcctatttcctataaggatataaggatctccctgctcactgtctctttctaaagtggtgctctccaacagaaataaaatgcaagccaccctgtaattttacttttttttttttttgagacggagtctccctctgtctcccaggctagagtgcagtgatgagatctcggctcactgcaacctccgcctccccggttcaaatgattctcctgcctcagcctcccgagtagctgggattacaggcgcccaccactacacccagctaatttttgtatttttagtagagatggggtttcgccatgttggccaggctggtctcaaacacctgacctcaggtgatccgccgcctcagcctcccaaagtgctgggattacaggcgtgagccacctcatccggccaattttacttttttttttttttaaagagacagggtcttgctctgttactcaggctggagtgcagtggcgtgatcacagctcactgcagccgtgaacttcaaggttcaggcgatcctcccgtctcagcctcctgagtagctgagattacaggtgcacatcactacacctggctataatttaaaattttctagtagccacattaagaaaaaagtacaaagaggtaaaatttatcttaatgatatattttactttacccaatatatacaagatgttatcatttcaacacataatataaaacattattaagaagatgttttatgttctttgttttgtctttaaatttaatttgttttgatacatattcatgtaataattgtacatattcatggggtacatattgatgtttcaatatacaatgtatagtgatcagaacactgtaattagcatatctataatctcaaatattgatgcttatgttggaaacattcaatatcctccttctagctctttgaagctatatattattgttaactatggccatactacactagaacctattcctcctatctagctataattttatatcctttaacaaatctctccctatctctcccttcctcctgcccttcccagtgttttttttttaactaagtctttgaaatttggtgtgtgttgtacacttggagcacatctcaattcaaacactaaatttaagcagaaacacttcacatatatttagattttataaataccatttaaaaagtagattcatttaaggtaatggatatcccagttacactgatttgatctttacaaattatatgaatgtattaatattaaatgtttgaatacacactcaaaatatgtatatctattatgttatcaataaaaaaatagaaaaaaacactgggaacaaaagtaaattcacgagtccaggttggtccaaatgtacttaaaagttttccagtaattgaatagagtatcagtttttcaattaaaattagttacagttaaataaaattaaaaattcagttcctcagttgcactagtcacatttaagtactcagtagtcaatgtggctagtggctactatattgagcagttccattctaaaggatttagtaggggttttcttagatatgaactttgaaggtgggaggatcctgaatatcttccatgtatatagaactttgaatatagccaaagcattttcatatcttctatttctttttagccacacaacatttctggtaggtaagttgaacagatgttatttgccccaatttacagatgagcaaactgaggctttgagcaaattaaagcccaagttcccaaagcaagttagcgatgaagccaggattggaattcttattcagcacttcttaagtgtttccttcttgaggcatatttcaaatactaggatctgcggctgcaacagtagcgttaagtggcatggcatccacattggtcatccttcagcatcaaatttgctgcctgtgtagaattattgactgccctgtgttcccttatatgcccctattctaaatccctcacacaatccagcaggtgtgtcctttctcctggagaggcttgacatgatgcccctcctcttctctctttacccccagcatcttgtaccttattttatgtattaattattattattattatgtagagacgtgtcttgctatgttgcccaggctggacttgaattcctgggcctttctcctcagcctcccgagtagctgggactgtagtcatgcaccaccatgctcagcaagttgtaccttattttaaagcacaattccattcaaacatttagctaaatgtttttagctaaaacgttggtcacctctgggaagtcataaggttcaggggcagcacaatatcctatgctctaaatactcactgcacacacatgagcgaaaataagaaccacttctggctcagggtttcccaccgcccttccagaattatgtgctgttaacttgcagcaggctagtccctcagacatgtcccaggcatcatgtggacagcagcctgagctgacacctgcccagtgcaatttccttcacagatcatgtcatctcctttgaatctctcatccacctagcagaatgttatagatcttctccctgacccccactgtctgattccagcttctttctcctttattcctgctgtgccatgctccaaggatgcgataggcttgttatgtatgacttagatgtccacactgtatgcacagattttccctggggaagaaatgagaaaagaaacagaggatatgcatgacaccagagtggcctttggagacagacatacctagtgtgagcacaggtcttacctccagtttcctcatctgttaagtggggactactaataggactcttgtgtgggttaaaagacatcatgcatgtaaggcactcaataaggactcaagaaatggaagttattattgctgttgtttttaaacaaaagtaatatttagccgggcgcggtggctcacacctgtaatcccagcactttgggaggccaaggtgggtggatcacgaggtcaggagatcaagaccatcctggctaacacagtgaaaccctgtctctactaaaaatataaaaaattagctgggcacagtggcaggcgcctgtagtcccaactactcgggaggctgaggcaggagaatggcttgaacccgggaggcggagtttgcagtgagctgagattgcgccactgcactccagcctgggcaacagagcaagactccgtctcaaaaaaaaaaagtaatatttaattgaaattgaactataacatgtaattgattttattgaataatatataattgaatatttaattttaaatttaaatatttaactgagaaagactgaatacattcaagatgtacggtgttgacttgatatgcatgtacactgtgtaatgattaccaaaatcaaattaattaacacatccaacaccacccattttctacactagatccccagaatttgctcatctgataactgaaagtttatactgtttgactaacatctccccattttccccatcccctcaccctagcaaccaccattccacctactccctgcttctatgagtttgactttcttagattacaaatataagtaaaattgtatgtatttgtttttctgtatctggcttatttcacttagcataatgccctcaagtttcatccacgttgtcaaaaatagcaggatttcctttatatggctgaataatattctattgcatatatgtaccacaatatatttatccattcacccatcaatggatacttaagttgattccatatcttgactatgataaataatgctgcaatgaacatggggaggcagatatccaaaggaaataaaatcagtatttcaaagagatatctgcctccccattgaaatactgattttatttcctttggatacctgcctccccatgttcattgctctgcttcctcccttctaatagaaacacgatttcatatggacagcaaaatgcctatttgaaaagattctcctccttggatgtcctgcagctagagtggcacgtgagcagacatctgctgtctagtacttccttgaaagctagtgttttcctggcaaagagctctttggtgtcttttgccctttcttcctgtttaaaatccaaccttgaagcttgcgtgtgaagtagccaccttgcagccatggggataagaggcctgcactgtgctgctgcatatggccacactggttgtgcacagtgactatagagttgaatcagtcagggtcctggcaggatacagacagctccctccaatagggtaatggtggagactttttaaaaaggcactaattgaaaaggtgtaatcactgtcagggaaacatggttaagagatgatgcagtaccctggggctagcaatagcagggagttattaccaccccaaactctgaagggcaacaagagagagtggtttccaggacctggagagaggatatggagagggtggccagcaagagcggccctcccactgggatacagccaacctgtggtgctctgcacaaaagggacgaggggctgattaccccagcctcacagtctcctgttggtagtgtctcccattgaccaaatccaactagaagtcagagggcaagaagctcaagtgctataatccattcaggtcagcctctcaggacactgaacaggttgaagggtggagagtagatctgtagaagtaaatggaaaatatccttgcattatatgaatggggtccctggcactctgtcattctgcagcctggcatatgctaaagatggcagagaatcaccacagcagccctgaactaactactcatggaaaatcttgctatgtgaggaaaataaacccttaagtggtcaactaagtttggttagatttagttacatgcctgagtgcaaccccatgcaatatgtatgcatttcacatgcattttatatttgtggtatcacttgtcaacaaaacatgtatcttagtctctattattccatgtttatttcttactagttgaaggtcagatgttcatcatttcttcttgctaactgggtctgcctttactgagtatataacttttagataaggtcctagataaaatctattaaagctgataagtttgcctgggaggaaaggaataagtcttctgtagtagtacatgaattaccacattgggtcaggctgacaagcctctttgccacgtttgtctcccatggctgggctccaagatcacacatatggggcaggaattaccatagcagcctcaattccctctcttttgcctggtgtggttcagttgcaggtcatcttcctgttgccctgagcttcggtgctcttgctttcccctgctactccctgaactgcagcaattgctccagcacctgagtctcacacttgagttccctctctcccgcatgcggtaactgtttttcttccttggcccagttccctgttctggcaattaagttaggttctatctagcctggagccctgccttgctcttgccagctgccctctctatgctttggacatagcttcagccaagatccatggctggagccctgcaatctgtaaacagacctctcagacaccatctgtttccctcaccttggcaacagtccctgcccaggatctctgctatcgagttctgcccacttgctagcactccccagaacctcttctcagacctctggcaataagcctttggcccttggcctgagtcctcaattgagattaaagacattgcaatttacactcttggctgaaaacacaggactgtctgccacctccagcaccagattctcactctagggttgactttttggcctgcagctcaggaggaggaatagaaagtgtagaaatataataaaatcatgataatgatagaaataaaacaatctactacttattaaatgctaactacatgtcagacattgcgtaagtatagcacagtccttgcttggcatggtaacagcacagatttcaattagcaccgtttagttatataacacaagtcccccaataatacagttcaaatttcagttaccacagtatattcactgtaagtaattgcataaatacaagctttgctgccaggttttcagtccacaaaattactatgtaaataacagatgcacgccatggtcagtgaccacagcacatcacttcatttctagtctgctggtgactggtcactggacatctgttatttagttatgcacagacagcaaagcatgtagttgtgttgcctctttatctccaagtaacattgtaaaaaatggacgatagaatttgccaataaagataaaagtgaagcaaagaaacaaaaagtgattattgtggcagtgaagttcaaatcaaagatcactggagttacagaagaaattggtggccatgggaatgttgacattgccactgttcaactccagatgggcatccagagagacttagtaaaggtaaacttatgaacacaaataaggaaggaagttgtaaggaaaaggataaagatgttccagaaagtgacatgggcaaaaaattcacattaaaggaatgctgaaagatatctcacaacattgaaagcacaaaggaaaacttagaaaggaggctgggcatggtggctcacacctgtaatcccagcactttggaaggctgaggcttgagctcaggagttcaagaccagcctgagcaacatagggagaccccgtctctacaaaaaataaaaaagttagccaggtgtggtgttatgtacctatggtcccaactactcagaaggctgaggtgggaggatcgctttagcctgggaggtcaaggttgtggtgagctgtgatcatgccactgtacttcagctcaggtgacaaagaccctgtctcaaaaaaaaaaaagcaaaacacattaattctcaatatttctgttttaaattatggcataataaagaaatattaggtttacaattttttcatttctctatatatttatatccaacagtaagaaagtttttaatattttgacaaaagtttttaaacatcacaaaacaattgtaatttttcccactgataattgagatcactttgaagggtgttggcttgcatatcatgtttacagaacagtgttatcatgcaaagtgaagactgcctgtactttacatgtattatttcatttacctatttctttctttctttttttccccccttgctaggtcactgccccattttcagcactagatggtgctgaaacccacgtttgcctccattctaataaataatcagtgcccctcatccttaatgggggatatcccagtagtttgggaaggctagctaggggttcagtgtccaagggacctatggacccaacctcctacagtgtggtgctgctgaacagccactatgatttggtgtctccatctctttttgtcaagttacacagcagagtttccagagctgggatggtagtctcacctctcccctttgtctctggctgttctcagggatatttctcctctagggactgctgatgcttctagtggttgaggctgggacaagtctcctgcaagggaacccaagattgtggagaagctggttgtctatgccttgatctcactttttacagtgtacagactgtgagttgggggaaattttcatgcagttggtgcctggcagattgtggggaggggattacagatatggaagtctgattctcttaccatctgctcagagttttttaaacttctctgtggccccagcaaatgtctcatcctcatatttgagttctcggatattgctggtgataatttcagtgttgaatattagttttgggttttccattggggggtgtgaagccagattgcttccttgctgccactttggaaccatattatctcatttaatcctttgactaaccctaagaagcagatgctcttattattcccattttatagacaaagaatctgaggttcaaagaggataaataatttgaccaaggccatacaactagttaagtagctacaacctattgggtcttaaagcccttgatcttaaccccaaatgaaacagtccaggtaaatgactctggtgggtgtttgatacggaggagtgggcagagaggagaggaagtagtgagagatgaaagtaccttctctaacatatgcctaaaaagtctagagcagcactgtccaatagagctttctataacacaacagatgctcccttacccaagggggatacattcaaagacccccagagatgcctaaaaccacggatagcaccaaatcctatatacctctaactaagacagctactcaattacgaatgggcaggtggcacatacagtgtggaaacactggacaaaggatgattcacatcccaggcaggtaagagcgggacagcgcaagacttcatcatgtgactcaggatgttacacaatttaaaacttacaaattgcttatttctggaattttccatttaatattctcagactgcattgactgtgggtaagtgaaaccatggctaaagagggattcctgtacatgtatagaatacataatatttatataatctataatagagaattaatgtatctattcaaccctggtatacatgtaggtatacatggacttcaggatccatcttttcttgatcctccaggactttgatccaccaaatcccagctctttctgaacagatctacttgccctatgggatgtaatttccagtggagctgctctacttcactaagtactcaggaaattaggcttcttccagctcatggtccaagatggctgctccagttctagccattacatctacattccagacagcaggaaagagtaagagaaaggaagcttccctcctctagaacacattctggaattatatatattacttttgcttacaacccataggtcaatatttagccacaggccacaacaagttgagggaagcttgggaaattagtttttatttagaatggtcatgtgcccagctcagagtccagattctgttactgaaaagaaaaggagagcagatcttgaaggagagtgggtacagtagtctgggaaagttcttatttgtttgtattttgtttgtttgtttttttccttcccagcctcaataatgagaggcaggcaaggagaaggttggaaatgattgctggttgtgctcttccgaccttttgtttgcaactggatccttcttctgggcccacaagtctcaccatccaaaataataacaatttacacagtacctctctctccttgccagccattgttctttctttccttacatggccaagtctctgtaaagaatagactacacatgttatccgcattttctaactcatgcttcagttctctctggcttctttccctcccactccattgaaaacattttaattctaggccactactaacctcctaatttgcaaatccaacagttgcttcttcgtcctcttcttccctgacctctctgtggcttttggctttccttaccacttctgcctctatgaaaccctctttgcctgtggcttctttgacatcaccctcacccagttcccttttaacttctctggctacctattctctatttccttcatgagtgcctcctcttgtctttaccccatcaatgctggcttcttcagggtgctattttccatccctcttctccaaactctcctcctaggttgttgtttccaaactacattcttgaagtttcagagattgaaggtactttactgtgaaatggggacctattttagatgcctccctcaaggacagattactcaaaactgctctactaaaacatctttcccattggattatgtactttgtcatagattgaattgtatctcccccaaaagacatgctgaagccttaacccgctgtacctatgaatatgactttatttggatatgggatccttgctgatataatcaagttaagatgagatcacaggatgagccctaatccaatataactagtgaatttataataagaggagaagaggctgggcgcagtggctcacatctgtaatcccagcactttgggaggctgatgcaggaggattgcttgagctcaggagttcaagaccagcatgggaaacatggtaaaacctcatctctagaaaaaatttaaaaactagccaggcatggtagtgcacacctataatctcagctactccaaaagctgaggtgggaggatcacttaagcctgggaggtggaggctgcagcaagctgagatcgcaccattgcactccaacctggatgacagagccagaccttgtctcaaaaagaaaaaaaaaaaagaagagacagacacacagggagaacaccacgtgatgatgtgatggagtcagagactggagtgattcattgacaagtcaagggctgccatggattgacagctgccaccagaagctagaaagaggcatggaagcattctttcctacaggttttgcagggatcacagccctactgacactttgatttcagacttatatatccttcagaactgtgaaacaaaacattcctattgtttcacagcagccctaggaaactagtacacatttcctcatcaccctgcagctccctatctaagccaccagttatagcttgcaatctcttttgtcttaaaaatattttgccttaatttttctcctagttcaagggtacttgggctttcaaatatcatagactagtttttttaaatttgaagttcaacattagggttggaacgtttgattttttcctttaaccttgtgctataagggcattagaaaaaaactaccatctaggcacaaaactctcagaacaaagtacagttctttaaattaaacactttgggttttatgaaaaactcactgctttattccaactcttccagttttatttcaaatccataaaaactttattatggcaacatttaagagcctcctatgttatgtatgtgacatagaaaaatattaatagataaatattcataacctcttttctgttcgcagacatcttatttctccctccctttccaaattctctttggacatattatgaaattgggctggccaggcgcagtggttcatgcctgtaaccccagaaccttaggagaccaaggtgggcagatcacctgaggttgggagttcaagactagcctgaccaacatggagaaacctcatccctactaaaaatacagaattagccaggcgtggtggtgcatgcctgtaatcccagctactcaggaggctgaggcaggagaattgcttgaacctaggaggtggaggttgcagtgagccaatatcggcgccattacaccccagcctgggcaacaagagcaaaactccatctcaaaaaaaaaaaaaaaaatgggttaatactcagtgagagggagaatttaagaagcagaagctaaaaaaaatagtgagaattccttttggggtttttgtttgtttgtttgttttttagactgagttttgttcttgttgcccaggctggagtgcaatggcaccatcttggctcactgcaacctctgcctcccaggttcaagtgattctcctacctcagcctcccaagtagctgggattacaggcatgcaccaccacgcccggctaatttttgtatttttggtagagatgggtttcaccatgttggccaggctggtctcgaactcctgacctcaggtaatctgccctcctcggcctctcaaagtgctgggattacaggtgtgagccaccgcacccgtcctgagaattcctttttaaaacatagagagttatctctcaaaaaaagcttagatagatgagaaggtggagaagcatgctgaggtttaagggagttgggtgaatgaggcatataagagaaattgaaaatggtaaaataagaggaaaaaagagttttaggaaatttactatacagtgtctgtgttctcctttgagtacctcttgagaatctgaggtagggatttaaattgctttcaattttttcttccactggacttgtatctcttatttatctctctttaataaaaatagagatgggatctcaccatcttgaccgagctggtctcaaactcctgggatcagtggatccttctgtctcagcctccaaaagtgctgggattacaggtgtgagtcaccatgcccagtcctttttcaattaaaattttaaaaaataacttgtattgtggatatttaagatatacaatatgaagttgatatcatatagaccaggggtccccagtccccagcaaccagtcctcggcctgttcggaacccccatgaccttcctgagctctgcctcctgtcagatcaaccgcgcattagattctcataggagctcgaaccctactgtgaactgcccataggagggatctaaattgtgtactccctatgagaatcttatgcctgatgatctgaggtggaacagtttcatgccaaaaccatagcccccatccccttgccaagtccataccacccactcccctgccaagtccgtggaaaaattgtcttccatgaaaccggtccctagtgccaaaaaggttggggacagctgaaacaggcagtcacaaggttactatagtgaagcatattaacatatccatcatctcatatagttaccaccaaccctttttgtgtctctgtggcaagagtggctaaaatctactcatttggcatgaatcccatatgcagtgcagttttattcctaatggacttgtgtgattatgtgtaggaccaaatcacagggcagctaggccttattaagtgttgcattggctgggtgcggtggctcatgcctgtagttccagcactttgggaggccaaggcaggaggatcactggagcccaggagctcgagcttgcagtgagctctgatcgcgccactgcattccggcaacagagccagaccctatctaaaataaataaataaaaataaagagttgcgtatgactgctaccagaggcagtatggtataatggttggatatgactgctatcagaggcagtatggtatatgatataagggcttgggggttctggaatcagaagccctgtgttggaatcctggccccagtcttttttttcaacacctctcctttgtgtccatcagaaaattaccttactgcactgtgcctcatttccccgtccatgaaagggagataacaggagccaccacactggattgctggatggattacatgagttaatacacatgaggcacttagggcatgccaggctgtggacagccctcacttgttagctagcaatgaaacagaaacctagaaaaccatctctcctctgcttaagccaaacaaaccaaaaatacctcttgtggctcacggttcccaagcttcctggcatggctccgcacaaagctgccttcggttcgcccggcaggctttgtagcgaccttccctgcccgggtcccagtcacggtcgggagcagccgccgtggcccgggctcgcgaggcaggctcccgcccgcaccctcccgtgcgaggtccccgccctgcgctcccagctcttcgaacctctacccgagcttctctcacgttgcttgtgagactgcctcgcccacacatcctagatgctcaattaaagtggacgtaaaggaagatgctgtggcttcttcccaaaataccgaacgggaggctctgggtggggatgggagacgtggtcagtgggaagcgtccttccaccctaaggtgcgttgctccgggtggccgctggccaagtcgcctggggtgggggcggggctcccctgtcaggaccccccttccccagcgtctctccactgcccgcgggcctccagcctggccgccggcgcccgcggccacgtgaccccagcacagctggaggcgggtccccgccctccccagggagcagccggttgaggcgggagcggtgcattgtgggcagaggggcgggggttgggaagatggcggctcccagcctcctcaactggaggcgagtttcttccttcacggggccggtcccccgcgcccggcacggacaccgagcggtggccatccgggagctgatgatcatctttggagggggaaatgagggcatcgcggatgagctgcacgtctacaacacgggtaggcgcggcggcggctcgtcggccccgcctgctggagctgcggagggggaggggaggcgaggcggcggccgcggccctgacagctgtcaccgcccggtcactgcttccttgggcgggcggcggggagcgcggctcagccgggcagcccgggtccggcagctctgtcccggaccgcagctcaggatctccggggcccttggggcgcaacggaccccgagcggggcgcaccggccttcaggcgggggatcccggacgcccccaccccagcccgacaggcggacgcaggcgacagaagaccatgtccaaccgcctgggccactccccgaaatctcgcctctgtcaaaaaacaaaacccactccaaaccaaagttccttagggcctttcccgtctttgcctgccttccttccttaggaggaagaccatctagggggtgaggagggaaaacgagaggccttctggcactctcgcctcaaatacaacccggtgtttggcaggtaacggtcaagagcccctccgtgagccgcgctctaaagcggcggggacgtggtgaggcggccttgtgtctgcatactcggtgtggacgcccttctggactggccctcggaaagaggactgtcataacttgagcaccactgcagatcacaagtgcccctgggcagggagcccctatctttgaggacctctgtggaatagaaaggaaactggatttaatttttttttccccttgtaaatgctcaggctgtcacaagaaatctgtttggtgtaaagacagtgatggaattttgggtctacttcatgaccgataacttttctttgatcaaacaacttaatcacaggaataatttgaaggttaacaaaatagtggagtctgagaagttttatttttttcaccctctcctcctcccagcgccccagcatatgaaggtaaaaagttactgacactttggtcttagtgta
